(19) United States
(12) Patent Application Publication
(10) Pub. No.: US 2003/0148324 A1
(43) Pub. Date: Aug. 7, 2003

(54) Polynucleotides which are of nature B2/D+ A- and which are isolated from E. coli, and biological uses of these polynucleotides and of their polypeptides

(76) Inventors: Edouard Bingen, Paris (FR); Stephane Bonacorsi, Nogent Sur Marne (FR); Olivier Clermont, Paris (FR); Xavier Nassif, Paris (FR); Colin Tinsley, Paris (FR)

Correspondence Address: NIXON & VANDERHYE, PC, 1100 N GLEBE ROAD, 8TH FLOOR, ARLINGTON, VA, 22201-4714, US

(21) Appl. No.: 10/238,075

(22) Filed: Sep. 10, 2002

Related U.S. Application Data
(63) Continuation-in-part of application No. PCT/EP01/03445, filed on Dec. 3, 2001.

(30) Foreign Application Priority Data
Feb. 2, 2001 (FR) 01 01449

(51) Int. Cl. C12Q 1/68; C07H 21/04; C12N 1/21

(52) U.S. Cl. 435/6; 435/252.33; 536/23.7

(57) ABSTRACT

The present invention relates to products which are of nature B2+ A−, isolated from E. coli, and to their biological applications, in particular their medical (therapeutic, vaccine and diagnostic) and biotechnological applications. In the present application, the expression “of nature B2+ A−” is intended to mean presence at a frequency greater than 10% among the E. coli strains of group B2 of the ECOR collection, and at a frequency of less than 10% among the strains of group A of the same collection. A phylogenic determination method which makes it possible to rapidly and easily distinguish the groups A, B1, B2 and D of the E. coli species with more than 99% precision is in particular described.

[0001] The present invention relates, in general, to polynucleotides which are of nature B2/D+ A− and which are isolated from E. coli, and to the biological uses, in particular medical and biotechnological uses, of these polynucleotides and of the polypeptides which they encode. In the present invention, the expression “the nature B2/D+ A−” is intended to mean that the polynucleotide is present with greater frequency such as observed in ECOR E. coli of group B2 (ECOR B2 frequency) and/or in ECOR E. coli of group D (ECOR D frequency), with respect to the frequency observed in ECOR E. coli of group A (ECOR A frequency). Preferably, the ECOR B2 frequency and/or the ECOR D frequency is greater than the ECOR A frequency by a factor of 2, preferably of 3, more preferably of 3.5, very preferably by a factor of 4. The set of polynucleotides which are of nature B2/D+ A−, provided by the present invention, comprises in particular products the ECOR B2 frequency and/or the ECOR D frequency of which is greater than 10%, and the ECOR A frequency of which is less than 25%, preferably less than 20%, more preferably less than 10%, and very preferably less than 5%, while always remaining less than the ECOR B2 frequency and/or the ECOR D frequency.

[0002] The ECOR collection is a collection which represents the genetic diversity of the E. coli species; it is available from banks such as the ATCC.

[0003] The E. coli species is currently divided into four main phylogenic groups termed groups A, B1, B2 and D. Currently known techniques for determining the phylogenic group of a given E. coli strain comprise multilocus enzymatic electrophoresis, or MLEE, and ribotyping. Descriptions of these techniques are in particular described in Herzer et al. 1990 J. Bacteriol. 172:6175-6181 and in Selander et al. 1986 Appl. Environ. Microbiol. 51:873-884 for MLEE, and in Bingen et al. 1994 Clin. Microbiol. Rev. 7:311-317, Bingen et al. Clin. Infect. Dis. 22:152-156, Bingen et al. J. Infect. Dis. 177:642-650 and in Desjardins et al. 1995 J. Mol. Evol. 41:440-448, for ribotyping. Briefly, MLEE is based on the analysis of the migration polymorphism of bacterial enzymes. For each strain, a large number of enzymes characteristic of the species (often greater than or equal to 20) are characterized by their electrophoretic mobility. The existence of migration variants for these enzymes makes it possible to characterize each strain by an electrophoretic type. With regard to ribotyping, it is based on the analysis of the restriction polymorphism of the chromosomal regions which include the genes encoding the 16S and 23S RNAs. This polymorphism is revealed using a labelled cDNA probe, prepared from the 16S and 23S RNA of E. coli, which can be hybridized to the DNA of the strain studied, after digestion of this DNA with various restriction enzymes and. Southern transfer.

[0004] The techniques of the prior art are, however, complicated to carry out for industrial-type applications, such as analyses in a medical environment or large scale screening of strains of interest for biotechnological techniques such as cloning. In addition, these techniques are long and require the availability of a collection of reference strains.

[0005] A collection termed ECOR has, moreover, been constituted in such a way as to represent the genetic diversity of the E. coli species. This collection is available in particular from the ATCC (ATCC No. 35320 to No. 35391). It comprises:

[0006] 25 E. coli strains of group A,

[0007] 16 E. coli strains of group B1,

[0008] 15 E. coli strains of group B2,

[0009] 12 E. coli strains of group D, and

[0010] 4 E. coli strains not assigned to one of the four groups A, B1, B2 and D.

[0011] In order to provide a more effective solution to the problem of the phylogenic determination of a given E. coli strain, the present invention makes the original and pertinent choice of isolating the entire set of its polynucleotides which are of nature B2/D+ A−, as defined above. Such a solution has never, to the Applicant's knowledge, been proposed. Now, the present invention demonstrates that this particular choice not only makes it possible to solve the problem of the phylogenic determination of a given E. coli strain, but also makes it possible to detect and to treat an undesired development of E. coli , and more particularly a development of E. coli in a human or animal compartment which is extra-intestinal (systemic and non-diarrhoeal infections, such as septicaemia, pyelonephritis, or meningitis in the newborn). The present invention in fact provides, in addition to the diagnostic and therapeutic means directed against E. coli in general, specific diagnostic and therapeutic means which have the advantage of distinguishing between E. coli capable of infecting the extra-intestinal compartment (E. coli of group B2 and D) and E. coli which are part of the normal physiological flora of humans and animals. Besides the less deleterious effects that such treatments offer patients suffering from an extra-intestinal E. coli infection, these specific diagnostic methods and treatments according to the invention make it possible to limit the development of bacterial resistances which are more and more frequently observed as broad-spectrum antibiotic treatments are used.

[0012] The inventors have therefore developed means which provide access to the entire set of polynucleotides which are of nature B2/D+ A−, as defined above. To the Applicant's knowledge, this is the first description of such means and the first description of such a set of products. These means also demonstrate that there are genomic regions which are of nature B2/D+ A−.

[0013] In the scientific literature, a few products have been individually described as being present in one or more E. coli strains of group B2 or D, and as being generally absent from one or more E. coli strains of A. It is in particular the case of the sfa, ibe10, hly, pap, prs and kps genes, of the genes involved in sorbose metabolism. The reliability of these products as phylogenic markers has, however, never been demonstrated. In any event, there is nothing to indicate that these products are capable of effectively distinguishing between the various phylogenic groups of E. coli. In addition, these products have been isolated separately, with the observation of their presence in one or more E. coli strains of group B2 or D, and of their absence in the few E. coli strains of group A which have been tested, being made a posteriori. Those skilled in the art did not, therefore, in the prior art, have means for obtaining other products possibly having the nature B2/D+ A−.

[0014] A concept which is common to the various aspects of the invention corresponds to producing phylogenic markers of E. coli by choosing to isolate the set of the chromosomal and plasmid DNA fragments of E. coli which are of nature B2/D+ A− as defined above, and developing, for this purpose, a method which is capable of allowing the entire set of these fragments to be isolated.

[0015] The method used consists in subtracting the polynucleotide population of one or more E. coli strain(s) of group A, randomly sheared, from the polynucleotide population of one or more E. coli strain(s) of group B2 or D, cleaved with a restriction endonuclease allowing fragments comprising from 100 to 1 500 bp approximately, with a mean of 300 to 500 bp approximately, to be produced, such as Sau3AI, Tsp509I, MspI or MaeII (any restriction enzyme with short restriction sites, for example for bp). This method makes it possible to obtain a library of products which are of nature B2/D+ A− as defined above. Example 1 below gives an illustration thereof, for which the E. coli strain subjected to subtraction is the E. coli strain C5. This particular strain is classified, according to reference techniques, in the phylogenic group B2, yet it comprises, in particular at the plasmid level, DNAs of D origin. The specific choice of E. coli C5 therefore has the advantage of isolating polynucleotides which are of nature B2+ A− and/or D+ A−, using a single strain.

[0016] Such a subtraction can be repeated over and over until the desired level of exhaustiveness is obtained (the level of exhaustiveness of the library can be estimated by searching for the presence or absence of products known to have the nature B2/D+ A−, such as sfa, ibe10). If the intention is to increase the level of exhaustiveness, it is desirable to use different restriction enzymes between the various subtraction repetitions. Examples of implementation of such a method are in particular described in Example 1 which follows.

[0017] Various subtractive methods for isolating DNAs present in one bacterium and absent in another bacterium have been described in the prior art. Before the present invention, such a subtractive method had, however, never been applied to the E. coli species, nor had it been envisaged that such a method may provide a solution to the problem of identifying phylogenic markers in general, and to the problem of identifying phylogenic markers of the E. coli species in particular. What is more, the present invention proposes, for the first time, to apply a subtractive method to a specific choice of E. coli strains: firstly, an isolate of E. coli of group B2, associated with neonatal meningitis (E. coli C5 assigned to the phylogenic group B2 and comprising, in particular at the plasmid level, DNAs of D origin), and secondly, E. coli strains of group A from the ECOR collection.

[0018] The present invention therefore offers the means for obtaining all of the products which are of nature B2/D+ A−. As such, the polynucleotides targeted by the present application correspond to the set of polynucleotides which are of novel nature B2/D+ A−. Some of these polynucleotides correspond to products which are novel in themselves (SEQ ID NO: 1 to NO: 153, sequences corresponding to regions 1, 3, 4 and 5 identified in the following examples, orf sequences containing these sequences). Others correspond to products which have homologies with known products, but which are of novel nature B2/D+ A− (in particular SEQ ID NO: 170, 171, 174, 175, 178, 179, 183, 185, 186, 190, 191, 193, 194, 195, 196, 199, 200, 202, 205, 206, 208, 209, 211, 214, 218, 220, 221, 233, 234, 235, 241, 244, 246, 247, 248, 250, chuA gene and fragments of the chuA gene which have conserved this nature B2/D+ A− such as SEQ ID NO: 241, 195, 185 or 248).

[0019] A subject of the present application is therefore any isolated polynucleotide which is of novel nature B2/D+ A− and which corresponds to a novel product in itself. It is in particular aimed towards any isolated polynucleotide the sequence of which corresponds to a sequence chosen from the group consisting of

[0020] the sequences SEQ ID NO: 1 to NO: 153,

[0021] the polynucleotide sequences which can be obtained by digesting the total DNA of an E. coli of group B2 or group D (such as, for example, an E. coli strain isolated from the blood of a patient suffering from a septicaemic or meningeal infection) with a restriction enzyme chosen from the group consisting of NotI and BlnI, selecting those of the fragments obtained which hybridize with at least one sequence chosen from the group consisting of SEQ ID NO: 134, 144, 109, 115, 140, 135, 33, 56, 122, 130, 141, 25, 48, 51, 57, 121, 44, 45, 113, 119, 120, 23, 52, and

[0022] the sequences of the orfs (open reading frames) which contain one of these sequences,

[0023] the nature-conserving variant or fractional sequences of these sequences.

[0024] The production of this polynucleotide group is described in detail in the examples which follow. It corresponds to the polynucleotides which are of novel nature B2/D+ A− and which are also novel as products. Besides the isolated fragments SEQ ID NO:1 to NO: 153, it comprises the novel regions 1, 3, 4 and 5 identified according to the invention, and the orfs which can be identified on these polynucleotides (cf. examples).

[0025] The expression “nature-conserving sequence of a sequence” is herein intended to mean any sequence which has conserved the nature B2/D+ A− (as defined above) of the polynucleotide corresponding to this parent sequence. The term “variant” is herein intended to mean any sequence having nucleotide insertions and/or deletions and/or substitutions with respect to the parent sequence, this includes any sequence which is complementary to the parent sequence. The term “fractional” is herein intended to mean any fragment of the parent sequence.

[0026] In the present application, any strain is considered to be E. coli if it can be considered to belong to the E. coli species according to the criteria given by Bergey's Manual of systemic bacteriology (cf. in particular Volume 1).

[0027] Similarly, any E. coli strain is considered to belong to the group B2 or to the group A if it is considered as such after carrying out a reference phylogenic test suitable for discriminating between B2/D and A, such as for example multilocus enzymatic electrophoresis (MLEE) and/or ribotyping. Such phylogenic techniques are well known to those skilled in the art. Examples of suitable protocols are in particular described in Herzer et al. 1990 J. Bacteriol. 172:6175-6181 and in Selander et al. 1986 Appl. Environ. Microbiol. 51:873-884 for MLEE, and in Bingen et al. 1994 Clin. Microbiol. Rev. 7:311-317, Bingen et al. Clin. Infect. Dis. 22:152-156, Bingen et al. J. Infect. Dis. 177:642-650 and in Desjardins et al. 1995 J. Mol. Evol. 41:440-448 for ribotyping.

[0028] Examples of such determinations are given in the examples which follow.

[0029] The fact of being or of not being present in a given bacterial strain or sample corresponds to a notion which is common to those skilled in the art in the field. In order to determine whether a given polynucleotide is, or is not, present in a given E. coli strain, the determination can in particular be carried out by Southern transfer of the nucleotide population of said E. coli strain, and bringing this transfer into contact with the polynucleotide tested, or with a probe derived from this polynucleotide, under conditions suitable for polynucleotide hybridization reactions. Examples of such probes and such conditions are given in Example 1. A positive hybridization will then be interpreted as the presence of said polynucleotide in said E. coli strain, and a hybridization which is negative or insignificant with respect to the background noise will then be interpreted as the absence of said polynucleotide in said E. coli strain. The determination can also be carried out by PCR detection of a positive or negative amplification using amplification primers constructed on the basis of said polynucleotide and placed in contact with the nucleotide population of said E. coli strain, under conditions which are favourable for the amplification, using these primers, of a target out of this population. Illustrations of such PCR procedures are given in the examples which follow.

[0030] The majority of the polynucleotides which are of nature B2/D+ A− according to the invention are advantageously present in ECOR E. coli of group B2 with a frequency greater than 10%, particularly greater than 40%, preferably greater than 50%, more preferably greater than 60%, and even more preferably greater than 70% (cf. Example 2 and Table 3). Some of them are present in ECOR E. coli of group B2 with a frequency greater than 80%, or even at a frequency equal to 100%, while at the same time being present in ECOR E. coli of group A at a frequency of less than 5%, or even less than 3%, or even equal to 0%.

[0031] The polynucleotides which are of nature B2/D+ A− according to the invention can be used for simply detecting the presence of E. coli bacteria of the group B2 or D with a probability of at least 90% (presence of said polynucleotides). Taken in combination together, or with other products, they make it possible to completely distinguish between the groups A, B1, B2 and D of E. coli (cf. Example 5). They also have therapeutic, palliative and/or preventive applications of interest. These polynucleotides will be referred to hereinafter as: novel polynucleotides which are of novel nature B2/D+ A−.

[0032] The present application is also aimed towards any pair of primers which allows the PCR amplification of at least one novel polynucleotide which is of novel nature B2/D+ A− as defined above. The setting up of suitable experimental PCR conditions is accessible to those skilled in the art (cf. in particular Molecular cloning—a laboratory manual, Sambrook, Fritsch, Maniatis, and in particular Vol. 2, Chap. 14 2nd edition; cf. Ausubel et al. 1989 Current protocols in molecular biology; John Wiley and Sons Ed., and in particular Vol. 2 Chap. 15). Examples thereof are given in the examples which follow.

[0033] It is in particular aimed towards the pair of primers corresponding to the pair SEQ ID NO: 164 and NO: 165. This specific pair of primers makes it possible to amplify the fragment SEQ ID NO: 119 (clone TspE4C2).

[0034] The present application is also aimed towards any nucleotide probe comprising at least one novel polynucleotide which is of novel nature B2/D+ A− as defined above. It is in particular aimed towards any probe as obtained using at least one pair of primers according to the invention, in particular by PCR amplification (cf. examples), such as (SEQ ID NO: 160; 161), (SEQ ID NO: 162; 163) or (SEQ ID NO: 164; 165).

[0035] In general, any pair of primers which allows the PCR amplification, under conditions as mentioned above, of at least one polynucleotide which is of novel nature B2/D+ A−, and also any probe directed against such a polynucleotide, and any antibody directed against a polypeptide encoded by such a polynucleotide, can, in accordance with the present invention, be used for the phylogenic determination of a bacterium of the E. coli species. The present invention also demonstrates that the yjaA gene (SEQ ID NO: 254; protein of SEQ ID NO: 255) is a phylogenic tool of interest for E. coli. The use, for the phylogenic determination of E. coli, of any product which makes it possible to detect yjaA (cf. Example 5) therefore enters into the domain of the present application. It is in particular aimed towards any pharmaceutical composition comprising such products, such as a pair of primers (e.g. SEQ ID NO: 162; NO: 163), a probe or a specific antibody.

[0036] The present application is also aimed towards any antisense polynucleotide, characterized in that its sequence corresponds to the antisense sequence of at least one novel polynucleotide which is of novel nature B2/D+A− and any isolated polypeptide, characterized in that its amino acid sequence corresponds to a sequence encoded, according to the universal genetic code and taking into account the degeneracy of this code, by at least one novel polynucleotide which is of novel nature B2/D+ A−.

[0037] The present application is also aimed towards any combination of the polypeptides encoded by the polynucleotides of the invention with a binding product, capable of binding to at least one novel polypeptide which is of novel nature B2/D+ A−, and which will inhibit an important biological function, such as the extra-intestinal growth by growth in serum, or the multiplication in animal, such as disclosed in example 6. Such products correspond in particular to antibodies or monoclonal antibodies and compounds inhibiting the biological function of the polypeptides. Methods for manufacturing such binding products using the polypeptides according to the invention are available to those skilled in the art. They are conventional methods which comprise, in particular, the immunization of animals such as rabbits and the harvesting of the serum produced, followed optionally by the purification of the serum obtained. A technique suitable for the production of monoclonal antibodies is that of Köhler and Milstein (Nature 1975, 256:495-497).

[0038] In the present invention, the expression “capable of binding” is intended to mean physiological-type conditions (in vivo or mimicking in vivo) when said binding product is intended to be administered to a human or animal organism, and ELISA-type conditions when said binding product is intended to be used in assays and methods in vitro, for example for determining the phylogenic group of an E. coli bacterium.

[0039] The present application is also aimed towards any vector comprising at least one novel polynucleotide which is of novel nature B2/D+ A−, and also any cell transformed by genetic engineering, characterized in that it comprises, by transfection, at least one novel polynucleotide which is of novel nature B2/D+ A− and/or at least one vector according to the invention, and/or in that said transformation induces the production by this cell of at least one polypeptide corresponding to a novel polynucleotide which is of novel nature B2/D+ A−.

[0040] A subject of the present application is also any composition, in particular any pharmaceutical composition, comprising at least one compound chosen from the group consisting of the novel polynucleotides which are of novel nature B2/D+ A−, the polypeptides corresponding to at least one novel polynucleotide which is of novel nature B2/D+ A−, and the vectors and cells according to the invention, mentioned above. Such compositions are in particular useful for treating and/or for alleviating and/or for preventing E. coli infections, and in particular of infection by extra-intestinal E. coli. (systemic and non-diarrhoeal infections). When said compound is immunogenic or is made immunogenic, these compositions can correspond to vaccines.

[0041] A subject of the present application is also any composition, in particular any pharmaceutical composition, comprising at least one compound chosen from the group consisting of the novel polynucleotides which are of novel nature B2/D+ A−, the pairs of primers and probes according to the invention, mentioned above, and the binding products according to the invention, mentioned above. Such a composition is in particular useful for the phylogenic determination of an E. coli bacterium. It can therefore correspond to a diagnostic kit or composition.

[0042] A subject of the present application is also any composition, in particular any pharmaceutical composition, comprising, in association with an inert carrier, at least one compound chosen from the group consisting of the antisense polynucleotides according to the invention, mentioned above, and the binding products according to the invention, mentioned above. Such compositions can also be used for the phylogenic determination of an E. coli bacterium, and can take the form of a diagnostic kit or composition. They can also be used in a therapeutic capacity, in order to treat and/or to alleviate and/or to prevent any undesirable growth of E. coli, such as a sanitary contamination, an E. coli infection, and in particular the presence of extra-intestinal E. coli (cf. examples).

[0043] A subject of the present application is also any use of these products according to the invention for manufacturing such compositions.

[0044] The present invention also provides products for which the sequence exhibits homologies with known products, but for which the nature B2/D+ A− is novel. There are in particular the sequences SEQ ID NO: 170, 171, 174, 175, 178, 179, 183, 185, 186, 190, 191, 193, 194, 195, 196, 199, 200, 202, 205, 206, 208, 209, 211, 214, 218, 220, 221, 233, 234, 235, 241, 244, 246, 247, 248, 250, the orfs (open reading frames) containing these sequences, the chuA gene, the operon of this gene and of its nature-conserving fragments and variants, and the polynucleotides corresponding to a region 2, 6a and 6b of E. coli as described in Example 1 which follows, with the exception of the polynucleotides sfa, hly, cnf1, pap/prs, hra and ibe 10. These products will be referred to hereinafter as: products which exhibit homology but which are of novel nature B2/D+ A−.

[0045] The chuA gene is a known product (Genbank Accession No. U67920): it has been described in a few E. coli responsible for intestinal and extra-intestinal infections, in Shigella as a gene involved in iron metabolism, and has been described as being homologous to a Yersinia gene. However, it has never been described as a phylogenic marker. Now, the present invention reports, for the first time, its presence in the urophathogenic E. coli strain J96 and reports, for the first time, that it is present in 100% of the B2s and of the Ds and in 0% of the As and of the B1s of the ECOR collection. Four fragments of chuA which are of nature B2/D+ A− are also described (SEQ ID NO: 241, 195, 185 and 248).

[0046] The majority of the polynucleotides according to the invention which exhibit homology but which are of novel nature B2/D+ A− are advantageously present in ECOR E. coli of group B2 with a frequency greater than 40%, preferably greater than 50%, more preferably greater than 60% and even more preferably greater than 70%. Some of them are present in ECOR E. coli of group B2 with a frequency greater than 80%, or even at a frequency equal to 100%, while at the same time remaining present in ECOR E. coli of group A at a frequency of less than 5%, or even less than 3%, or even equal to 0% (cf. Example 2).

[0047] The present application is thus aimed towards any use of a compound which is of novel nature B2/D+ A− for the phylogenic determination of an E. coli bacterium, for the diagnosis of the presence or absence of undesirable E. coli bacteria, such as contaminant E. coli or extra-intestinal E. coli, and/or for the diagnosis of an E. coli infection, and/or for the manufacture of a composition intended for such a phylogenic determination and/or for such a diagnosis.

[0048] It is in particular aimed towards any use of at least one compound chosen from the group consisting of:

[0049] the polynucleotides corresponding to the chuA gene and to its operon,

[0050] the polynucleotides the sequence of which corresponds to SEQ ID NO: 170, 171, 174, 175, 178, 179, 183, 185, 186, 190, 191, 193, 194, 195, 196, 199, 200, 202, 205, 206, 208, 209, 211, 214, 218, 220, 221, 233, 234, 235, 241, 244, 246, 247, 248 and 250,

[0051] the polynucleotides which can be obtained by digesting the total DNA of an E. coli of group B2 or D with a restriction enzyme chosen from the group consisting of NotI and BlnI, and selecting those of the fragments obtained which hybridize to at least one sequence chosen from the group consisting of SEQ ID NO: 125, 123, 116, 43, 40, 127, 133, 27, 34, 36, 42, 46, 54, 55, 38, 128 and 151, with the exception of the polynucleotides sfa, hly, cnf1, pap/prs, hra and ibe 10,

[0052] the polynucleotides the sequence of which corresponds to an orf comprising the sequence of one of the polynucleotides cited in the preceding three paragraphs,

[0053] the polynucleotides the sequence of which corresponds to a nature-conserving variant or fractional sequence of the sequence of at least one of these polynucleotides (and in particular SEQ ID NO: 241, 195, 185 and 248),

[0054] the pair of primers, the probes and the antisense polynucleotides, the sequence of which is as derived from these polynucleotides,

[0055] the binding products which are capable of binding to a polypeptide encoded by a polynucleotide which is of novel nature B2/D+ A−, for the phylogenic determination of an E. coli bacterium.

[0056] The present invention is also aimed towards the use of at least one of these compounds for the diagnosis of the presence or absence of undesirable E. coli bacteria, such as contaminant E. coli or extra-intestinal E. coli, and/or for the diagnosis of an E. coli infection. It is also aimed towards any use of at least one of these compounds for the manufacture of a composition intended for such a phylogenic determination and/or for such a diagnosis.

[0057] These compounds chuA, SEQ ID NO: 170, 171, 174, 175, 178, 179, 183, 185, 186, 190, 191, 193, 194, 195, 196, 199, 200, 202, 205, 206, 208, 209, 211, 214, 218, 220, 221, 233, 234, 235, 241, 244, 246, 247, 248, 250, and the nature-conserving variant or fractional polynucleotides of these products correspond, in fact, to products which are of novel nature B2/D+ A− (as defined above). The detection of the presence or absence of such compounds can in particular be carried out by nucleotide hybridization, by PCR amplification or by detection of their polypeptide products. Detection of the presence of such compounds makes it possible to conclude that the B2 or D E. coli bacterium is present. The combined use of these compounds, or the use of one or more of these compounds combined with other products, such as in particular yjaA, makes it possible to refine the phylogenic allocation. The combined use of the detection of the presence or absence of chuA and of yjaA (SEQ ID NO: 254) makes it possible in particular to conclude as to whether E. coli of group B2 and/or E. coli of group D are present or absent (cf. Example 5).

[0058] The present application is also aimed towards any use of a compound which is of novel nature B2/D+ A− for the manufacture of a composition, in particular of a pharmaceutical composition, intended to alleviate and/or to prevent and/or to treat an undesirable growth of E. coli, such as an E. coli infection, the presence of extra-intestinal E. coli or a sanitary contamination. It is aimed in particular towards any use of at least one compound chosen from the group consisting of:

[0059] the polynucleotides corresponding to the chuA gene and to its operon,

[0060] the polynucleotides the sequence of which corresponds to SEQ ID NO: 170, 171, 174, 175, 178, 179, 183, 185, 186, 190, 191, 193, 194, 195, 196, 199, 200, 202, 205, 206, 208, 209, 211, 214, 218, 220, 221, 233, 234, 235, 241, 244, 246, 247, 248 and 250,

[0061] the polynucleotides which can be obtained by digesting the total DNA of an E. coli of group B2 or D with a restriction enzyme chosen from the group consisting of NotI and BlnI, and selecting those of the fragments obtained which hybridize to at least one sequence chosen from the group consisting of SEQ ID NO: 125, 123, 116, 43, 40, 127, 133, 27, 34, 36, 42, 46, 54, 55, 38, 128 and 151, with the exception of the polynucleotides sfa, hly, cnf1, pap/prs, hra and ibe 10,

[0062] the polynucleotides the sequence of which corresponds to an orf (open reading frame) comprising the sequence of one of the polynucleotides cited in the preceding three paragraphs,

[0063] the polynucleotides the sequence of which corresponds to a nature-conserving variant or fractional sequence of the sequence of at least one of these polynucleotides (and in particular SEQ ID NO: 241, 195, 185 and 248),

[0064] the polynucleotides which are antisense polynucleotides of the polynucleotides of this group,

[0065] the polypeptides the sequence of which corresponds, according to the universal genetic code and taking into account the degeneracy of this code, to these polynucleotides,

[0066] the binding products (for example, antibodies) capable of binding to a polypeptide encoded by a polynucleotide which is of novel nature B2/D+A−,

[0067] the vectors comprising at least one of these polynucleotides,

[0068] the cells transformed by genetic engineering which comprise at least one of these polynucleotides and/or at least one of these vectors, and/or the transformation of which induces the production of at least one of these polypeptides, for the manufacture of a composition, in particular of a pharmaceutical composition, intended to alleviate and/or to prevent and/or to treat an undesirable growth of E. coli, such as an E. coli infection, the presence of extra-intestinal E. coli or a sanitary contamination.

[0069] According to another applied aspect, the present application is aimed towards any method which makes it possible to identify a compound capable of inhibiting the growth of E. coli, and in particular of inhibiting its extra-intestinal development, which comprises the detection of at least one compound:

[0070] i. capable of binding to at least one polynucleotide chosen from the group consisting of:

[0071] the novel polynucleotides which are of novel nature B2/D+ A−, i.e.

[0072] the sequences SEQ ID NO: 1 to NO: 153,

[0073] the polynucleotide sequences which can be obtained by digesting the total DNA of an E. coli of group B2 or group D (such as, for example, an E. coli strain isolated from the blood of a patient suffering from a septicaemic or meningeal infection) with a restriction enzyme chosen from the group consisting of NotI and BlnI, selecting those of the fragments obtained which hybridize with at least one sequence chosen from the group consisting of SEQ ID NO: 134, 144, 109, 115, 140, 135, 33, 56, 122, 130, 141, 25, 48, 51, 57, 121, 44, 45, 113, 119, 120, 23, 52 and sequencing selected fragments, and

[0074] the sequences of the orfs (open reading frames) which contain one of these sequences,

[0075] the nature-conserving variant or fractional sequences of these sequences,

[0076] the polynucleotides corresponding to the chuA gene and to its operon,

[0077] the polynucleotides the sequence of which corresponds to SEQ ID NO: 170, 171, 174, 175, 178, 179, 183, 185, 186, 190, 191, 193, 194, 195, 196, 199, 200, 202, 205, 206, 208, 209, 211, 214, 218, 220, 221, 233, 234, 235, 241, 244, 246, 247, 248 and 250,

[0078] the polynucleotides which are as obtained by digesting the total DNA of an E. coli of group B2 or D with a restriction enzyme chosen from the group consisting of NotI and BlnI, and selecting those of the fragments obtained which hybridize to at least one sequence chosen from the group consisting of SEQ ID NO: 125, 123, 116, 43, 40, 127, 133, 27, 34, 36, 42, 46, 54, 55, 38, 128 and 151, with the exception of the polynucleotides sfa, hly, cnf1, pap/prs, hra and ibe 10,

[0079] the polynucleotides the sequence of which corresponds to an orf comprising the sequence of one of the polynucleotides cited in the preceding four paragraphs,

[0080] the polynucleotides the sequence of which corresponds to a nature-conserving variant or fractional sequence of the sequence of at least one of these polynucleotides and in particular (SEQ ID NO: 241, 195, 185 and 248), and

[0081] ii. capable of specifically inhibiting the correct transcription and/or translation of this polynucleotide.

[0082] The present invention is also aimed towards any method which makes it possible to identify a compound capable of inhibiting the growth of an E. coli bacterium, and in particular its extra-intestinal development, characterized in that it comprises the detection of at least one compound capable of inhibiting the activity of a protein encoded by a polynucleotide the orf of which comprises a polynucleotide chosen from the group consisting of

[0083] the novel polynucleotides which are of novel nature B2/D+ A− according to the invention, i.e.

[0084] the sequences SEQ ID NO: 1 to NO: 153,

[0085] the polynucleotide sequences which can be obtained by digesting the total DNA of an E. coli of group B2 or group D (such as, for example, an E. coli strain isolated from the blood of a patient suffering from a septicaemic or meningeal infection) with a restriction enzyme chosen from the group consisting of NotI and BlnI, selecting those of the fragments obtained which hybridize with at least one sequence chosen from the group consisting of SEQ ID NO: 134, 144, 109, 115, 140, 135, 33, 56, 122, 130, 141, 25, 48, 51, 57, 121, 44, 45, 113, 119, 120, 23, 52 and sequencing selected fragments, and

[0086] the sequences of the orfs (open reading frames) which contain one of these sequences,

[0087] the nature-conserving variant or fractional sequences of these sequences.

[0088] the polynucleotides corresponding to the chuA gene and to its operon,

[0089] the polynucleotides the sequence of which corresponds to SEQ ID NO: 170, 171, 174, 175, 178, 179, 183, 185, 186, 190, 191, 193, 194, 195, 196, 199, 200, 202, 205, 206, 208, 209, 211, 214, 218, 220, 221, 233, 234, 235, 241, 244, 246, 247, 248 and 250,

[0090] the polynucleotides which are as obtained by digesting the total DNA of an E. coli of group B2 or D with a restriction enzyme chosen from the group consisting of NotI and BlnI, and selecting those of the fragments obtained which hybridize to at least one sequence chosen from the group consisting of SEQ ID NO: 125, 123, 116, 43, 40, 127, 133, 27, 34, 36, 42, 46, 54, 55, 38, 128 and 151, with the exception of the polynucleotides sfa, hly, cnf1, pap/prs, hra and ibe 10,

[0091] the polynucleotides the sequence of which corresponds to an orf (open reading frame) comprising the sequence of one of these polynucleotides,

[0092] the polynucleotides the sequence of which corresponds to a nature-conserving variant or fractional sequence of the sequence of at least one of these polynucleotides.

[0093] Such compounds can in particular be obtained by screening chemical and/or biological libraries.

[0094] The present application is also directed towards any compound as identified by one or other of these methods, and any composition, in particular any pharmaceutical composition, comprising at least one such compound. Such compositions are in particular useful for treating and/or for alleviating and/or for preventing an undesirable growth of E. coli, such as E. coli infections, or an E. coli contamination, and especially useful for treating and/or for alleviating and/or for preventing the presence of extra-intestinal E. coli bacteria.

[0095] A subject of the present invention is also, according to a notable aspect of the invention, phylogenic identification methods which implement the detection of the presence or absence of at least one of the polynucleotides which are of novel nature B2/D+ A− (whether these polynucleotides are novel as products, or whether they exhibit homologies with known products):

[0096] the novel polynucleotides according to the invention, i.e.

[0097] the sequences SEQ ID NO: 1 to NO: 153,

[0098] the polynucleotide sequences which can be obtained by digesting the total DNA of an E. coli of group B2 or group D (such as, for example, an E. coli strain isolated from the blood of a patient suffering from a septicaemic or meningeal infection) with a restriction enzyme chosen from the group consisting of NotI and BlnI, selecting those of the fragments obtained which hybridize with at least one sequence chosen from the group consisting of SEQ ID NO: 134, 144, 109, 115, 140, 135, 33, 56, 122, 130, 141, 25, 48, 51, 57, 121, 44, 45, 113, 119, 120, 23, 52 and sequencing selected fragments, and

[0099] the sequences of the orfs (open reading frames) which contain one of these sequences,

[0100] the nature-conserving variant or fractional sequences of these sequences,

[0101] the polynucleotides corresponding to the chuA gene and to its operon,

[0102] the polynucleotides the sequence of which corresponds to SEQ ID NO: 170, 171, 174, 175, 178, 179, 183, 185, 186, 190, 191, 193, 194, 195, 196, 199, 200, 202, 205, 206, 208, 209, 211, 214, 218, 220, 221, 233, 234, 235, 241, 244, 246, 247, 248 and 250,

[0103] the polynucleotides which can be obtained by digesting the total DNA of an E. coli of group B2 or D with a restriction enzyme chosen from the group consisting of NotI and BlnI, and selecting those of the fragments obtained which hybridize to at least one sequence chosen from the group consisting of SEQ ID NO: 125, 123, 116, 43, 40, 127, 133, 27, 34, 36, 42, 46, 54, 55, 38, 128 and 151, with the exception of the polynucleotides sfa, hly, cnf1, pap/prs, hra and ibe 10,

[0104] the polynucleotides the sequence of which corresponds to an orf (open reading frame) comprising the sequence of one of these polynucleotides,

[0105] the polynucleotides the sequence of which corresponds to a nature-conserving variant or fractional sequence of the sequence of at least one of these polynucleotides.

[0106] This detection can be carried out by direct detection of said polynucleotide, or of its fragments, or by detection of one or more polypeptide(s) corresponding to it (polypeptides encoded by a polynucleotide which is of novel nature B2/D+ A−). In particular, the present application is aimed towards any phylogenic identification method characterized in that it comprises the use of at least one compound chosen from the group consisting of:

[0107] the novel polynucleotides which are of novel nature B2/D+ A−, i.e.

[0108] the sequences SEQ ID NO: 1 to NO: 153,

[0109] the polynucleotide sequences which can be obtained by digesting the total DNA of an E. coli of group B2 or group D (such as, for example, an E. coli strain isolated from the blood of a patient suffering from a septicaemic or meningeal infection) with a restriction enzyme chosen from the group consisting of NotI and BlnI, selecting those of the fragments obtained which hybridize with at least one sequence chosen from the group consisting of SEQ ID NO: 134, 144, 109, 115, 140, 135, 33, 56, 122, 130, 141, 25, 48, 51, 57, 121, 44, 45, 113, 119, 120, 23, 52 and sequencing selected fragments, and

[0110] the sequences of the orfs (open reading frames) which contain one of these sequences,

[0111] the nature-conserving variant or fractional sequences of these sequences,

[0112] the polynucleotides corresponding to the chuA gene and to its operon,

[0113] the polynucleotides the sequence of which corresponds to SEQ ID NO: 170, 171, 174, 175, 178, 179, 183, 185, 186, 190, 191, 193, 194, 195, 196, 199, 200, 202, 205, 206, 208, 209, 211, 214, 218, 220, 221, 233, 234, 235, 241, 244, 246, 247, 248 and 250,

[0114] the polynucleotides which are as obtained by digesting the total DNA of an E. coli of group B2 or D with a restriction enzyme chosen from the group consisting of NotI and BlnI, and selecting those of the fragments obtained which hybridize to at least one sequence chosen from the group consisting of SEQ ID NO: 125, 123, 116, 43, 40, 127, 133, 27, 34, 36, 42, 46, 54, 55, 38, 128, 151 and 211, with the exception of the polynucleotides sfa, hly, cnf1, pap/prs, hra and ibe 10,

[0115] the polynucleotides the sequence of which corresponds to a nature-conserving variant or fractional sequence of the sequence of a polynucleotide of this group (and in particular SEQ ID NO: 241, 195, 185 and 248),

[0116] the polynucleotides the sequence of which corresponds to an orf comprising the sequence of a polynucleotide of this group,

[0117] the pairs of primers which make it possible to amplify a polynucleotide which is of novel nature B2/D+ A−, as defined above,

[0118] the probes comprising a polynucleotide which is of novel nature B2/D+ A−, as defined above,

[0119] the polynucleotides which are antisense polynucleotides of a polynucleotide which is of novel nature B2/D+ A−, as defined above,

[0120] the compounds as identified by a method according to the invention for identifying compounds capable of inhibiting the growth of E. coli,

[0121] the binding products which are capable of binding to a polynucleotide which is of novel nature B2/D+ A−, as defined above,

[0122] the binding products (for example, antibodies) capable of binding to a polypeptide encoded by a polynucleotide which is of novel nature B2/D+ A− as defined above.

[0123] This implementation can be carried out according to any technique known to those skilled in the art so as to allow said “at least one compound” to detect, in a biological sample, the presence or absence of the polynucleotide(s) or, where appropriate, the polypeptide(s) which constitute(s) the target thereof: ELISA for reactions of antibody-antigen type, Southern-type hybridization or PCR for reactions of polynucleotide hybridization and/or amplification type.

[0124] Suitable biological samples comprise, in particular, all samples of human origin originating from sites which are normally sterile (blood, cerebrospinal fluid -CSF-, liquid from an effusion, etc.) or non-sterile (stools, oropharynx, skin, etc.), and also samples of environmental origin (soils, water, etc.), of food origin and of animal origin, and microbiological cultures.

[0125] This method makes it possible to conclude, when said detection is positive, that E. coli bacteria of group B2 and/or D are present. With only the detection of the presence or absence of chuA, this method makes it possible to conclude, when this detection is positive, that E. coli bacteria of group B2 or D are present. When this detection is negative, and insofar as the sample effectively contains E. coli, it makes it possible to conclude that bacteria of group B1 or A are present.

[0126] This method can also comprise the use of several of said compounds, for example in such a way as to detect the presence or absence of the chuA gene, and also that of the fragment SEQ ID NO: 119. It makes it possible then to conclude:

[0127] when this detection is negative for chuA and positive for SEQ ID NO: 119, that E. coli bacteria of group B1 are present,

[0128] when this detection is negative for chuA and negative for SEQ ID NO: 119, that E. coli bacteria of group A are present.

[0129] Examples of such methods and detection are given in the examples which follow. A pair of primers SEQ ID NO: 160 and NO: 161 which makes it possible to detect the presence or absence of the chuA gene, and a pair of primers SEQ ID NO: 164 and 165 which makes it possible to detect the presence or absence of SEQ ID NO: 119 (TspE4.C2) are described in particular.

[0130] The phylogenic identification method according to the invention can also implement the detection of the presence or absence of the yjaA gene. The yjaA gene (cf. FIG. 5) is, in the prior art, known to be present in the E. coli strain K12 (group A). There is nothing in the prior art which would suggest that it may constitute a phylogenic marker capable of distinguishing between group B2 and group D.

[0131] FIG. 5 shows the yjaA sequence (SEQ ID NO: 254) and that of the corresponding ORF (SEQ ID NO: 255).

[0132] The detection of the presence or absence of the yjaA gene can take place by any technique accessible to those skilled in the art. It can in particular take place by detection of the polynucleotide or of its fragments (SEQ ID NO: 254), or by detection of the polypeptides which correspond to it (SEQ ID NO: 255). The development of reagents which allow such a detection is accessible to those skilled in the art: amplification probes or primers for the detection of polynucleotides, compound of serum or antibody type for the detection of polypeptides. The polynucleotide hybridization reactions can, for example, be carried out by Southern and/or by PCR, and those of antigen-antibody type can be carried out by ELISA. Examples of implementation of such a detection step are given in the examples which follow. A pair of primers (SEQ ID NO: 162 and 163) which makes it possible to amplify yjaA are described in particular.

[0133] The present invention is also aimed towards any phylogenic identification method which implements at least the detection of the presence or absence of the yjaA gene. This detection makes it possible to distinguish between E. coli of group B2 and E. coli of group D (cf. examples).

[0134] Notably, the present invention provides a phylogenic detection method which makes it possible to completely distinguish the E. coli groups A, B1, B2 and D. This method implements the detection of the presence or absence of the chuA gene, of the yjaA gene and of SEQ ID NO: 119. This method is described in detail in the examples. Advantageous PCR conditions are in particular are mentioned therein (“simplified PCR”).

[0135] Advantageously, this detection can be carried out by PCR amplification. Examples of suitable PCR conditions are given in a purely illustrative capacity in the examples.

[0136] The present application is in particular aimed towards an identification method as defined above which implements the simultaneous detection of one or more of said polynucleotides which is/are of nature B2/D+ A−, and of yjaA, preferably by triplex PCR. Particularly advantageously, this method can be applied directly to the bacteria or to the sample analysed. It does not require the availability of a reference strain collection.

[0137] The present application is also aimed towards any method for detecting an undesirable growth of E. coli, any method for diagnosing an E. coli infection, any method for sanitary control or detection (foodstuffs, liquids intended for consumption, soils) and any method for selecting E. coli strains suitable for biotechnological manipulations, which implement the phylogenic identification method according to the invention.

[0138] It is also aimed towards any kit for implementing a phylogenic identification, diagnostic and/or selection method according to the invention, possibly accompanied by instructions for use. Such kits can in particular comprise at least one of the compounds used in said method. They can also comprise instructions for use featuring one or more of the profiles given in FIG. 4 (cf. Example 5), or describing one or more of these profiles.

[0139] An advantageous kit comprises at least one of the pairs of primers (SEQ ID NO: 160, 161), (SEQ ID NO: 162, 163) and (SEQ ID NO: 164, 165), preferably two of these pairs, more preferably the three pairs of primers.

[0140] The present invention is illustrated by the examples which follow and which are given in a nonlimiting capacity.

[0141] Other advantages and variants of implementation can be read by those skilled in the art in these examples. Such variants are targeted by the present application.

[0142] In these examples, reference is made to the following figures:

[0143] FIG. 1 represents the distribution of B2/D+ A− clones along the chromosome of the E. coli strain RS218,

[0144] FIG. 2 gives the sequence listing for isolated B2/D+ A− fragments, and indicates their respective SEQ ID NOS,

[0145] FIG. 3 illustrates a decision diagram for the phylogenic analysis of an E. coli strain,

[0146] FIG. 4 represents the various phylogenic profiles obtained using a triplex PCR method according to the invention (lanes 1 and 2: group A; lane 3: group B1; lanes 4 and 5: group D; lanes 6 and 7: group B2),

[0147] FIG. 5 represents the polynucleotide sequence of the yjaA gene (SEQ ID NO: 254) and the corresponding ORF sequence,

[0148] FIG. 6 represents the sequences of the CTF073+ K12− regions and RS218+ K12− regions obtained using the clones of FIG. 2,

[0149] FIG. 7 represents the position of the genomic fragment specific to E. coli CFT073 and RS218 strains on the chromosome of E. coli K12 strain.

### EXAMPLE 1

[0150] Production of a C5+ A− Library and of a RS218+ K12− Library

[0151] Materials and Methods

[0152] Bacterial strains. The strains used for this subtractive hybridization are an E. coli isolated from the cerebrospinal fluid (CSF) of a newborn (E. coli CS of serotype 018:K1:H7; group B2) and two E. coli strains of group A, ECOR4 and ECOR15, which belong to the ECOR collection (ATCC). E. coli C5 harbours several virulent factors, such as the K1 capsular antigen, an sfa operon, the ibe 10 gene, Pap pili and the haemolysin (hly) gene. This strain belongs to the phylogenic group B2. In addition, the ECOR4 and ECOR15 strains, which belong to the phylogenic group A, express no identified virulence factor. Other E. coli strains were used: strain RS218 (serotype O18:K1:H7), an isolate from newborn CSF, which has been described in particular by Huang et al. 1995 (Infect. Immun. 63: 4470-4475) and which harbours the same virulence factors as the CS strain; and the E. coli K-12 laboratory strain MG1655 (group A), the genome of which has recently been sequenced (Blattner et al. 1997, Science 277: 1453-1461).

[0153] In addition, we used a set of 54 NMEC E. coli which could be associated with neonatal meningitis, obtained from the CSF of newborns suffering from meningitis (age range: 1 to 28 days) and belonging to the phylogenic group B2. This population was compared with the 15 E. coli strains of the phylogenic group B2 of the 72 strains from the ECOR collection, which are, themselves, not associated with meningitis. This collection is available from the ATCC (ATCC No. 3520 to No. 35391). These reference strains, isolated from various hosts and from various geographical sites are representative of the variation range in the E. coli species, and are divided into four main phylogenic groups (A, B1, B2 and D), four of them being unclassified. The bacteria were cultured at 37° C. in a Luria-Bertani broth or on Luria-Bertani agar. When necessary, ampicillin was used at a concentration of 100 μg per ml.

[0154] Southern transfer. The Southern transfers were carried out by capillary transfer onto positively charged nylon membranes. The hybridizations were carried out at 65° C. in 1% sodium dodecyl sulphate (SDS)—1M NaCl—50 mM Tris-HCl (pH 7.5)—1% blocking reagent (Boehringer Mannheim, Mannheim, Germany). The membranes were washed, first in 2×SSC (1×SSC corresponds to 0.15M NaCl+0.015M sodium citrate) for 15 min at room temperature, and then in 2×SSC—0.1% SDS for 30 min at 65° C. and finally, in 0.1×SSC for 5 min at room temperature. The detection by chemi-luminescence was carried out with the DIG luminescence detection kit for nucleic acid (Boehringer Mannheim) according to the manufacturer's instructions. The sfa and ibe 10 probes were produced by PCR using primers and an amplification method described previously (Bingen et al. 1997, J. Clin. Microbiol. 35: 2981-2982).

[0155] Representational difference analysis. The chromosomal DNA of the ECOR strains was randomly sheared by repeatedly pushing it through a hypodermic needle so as to obtain fragments with a length of between approximately 3 and 10 kb. This digested DNA was purified by phenol extraction. The chromosomal DNA of E. coli C5 was cleaved with the Sau3AI or Tsp509l restriction endonuclease. This DNA (20 μg) was ligated with 10 nmol of hybridized oligonucleotides RBam12 (5′-GATCCTCGGTGA-3′; SEQ ID NO: 154) and RBam24 (5′-AGGACTCTCCAGCCTCTCACCGAG-3′; SEQ ID NO: 155) or REco12 (5′-AATTCTCGGTGA-3′; SEQ ID NO: 156) and REco24 (5′-AGCACTCTCCAGCCTCTCACCGAG-3′; SEQ ID NO: 157) when the restriction was carried out with SauAI or Tsp5091, respectively. The DNA was separated from the excess primers by electrophoresis in a 2% low melting point agarose gel. The portion of the gel containing fragments longer than 200 bp was excized and digested with β-agarase. This DNA was purified by phenol extraction.

[0156] For the subtractive hybridization (first round), 0.2 μg of E. coli C5 DNA, ligated to the oligonucleotides, was mixed with 40 μg of fragmented ECOR4 or ECOR15 DNA in a total volume of 8 μl of 3×EE buffer (1×EE buffer corresponds to 10 mM N-(2-hydroxyethyl)piperazine-N′-(3-propanesulphonic acid); 1 mM EDTA [pH 8.0]). The solution was covered with mineral oil, and the DNA was denatured by heating to 100° C. for 2 min; 2 μl of 5M NaCl were added and the mixture was left to hybridize at 55° C. for 48 h. The reaction mixture was diluted 10 times in preheated 3×EE buffer—1M NaCl and immediately placed in ice. A portion of the dilution (10 μl) was added to 400 μl of PCR reaction mixture (10 mM Tris HCl [pH 9.0], 50 mM KCl, 1.5 mM MgCl₂, 0.1% Triton X-100, a 0.25 mM concentration of each deoxynucleotide triphosphate and 50 U of Taq polymerase per ml) and the whole mixture was incubated for 3 min at 70° C. in order to fill the ends of the re-hybridized E. coli C5 fragments. After denaturation at 94° C. for 5 min an addition of RBam24 or REco24 oligonucleotides (0.1 mmol per 100 μl), the hybridizations were amplified by PCR (30 cycles of 1 min at 94° C., 1 min at 70° C. and 3 min at 72° C., and then 1 min at 94° C. and 10 min at 72° C., in a GeneAmp 9600 thermocycler [Perkin-Elmer]). The PCR products were purified on a gel in order to separate the E. coli C5 fragments from the primer and from the high molecular weight ECOR subtraction DNA. The second round of subtractive hybridization was carried out using 40 μg of fragmented ECOR4 or ECOR15 E. coli DNA and 25 ng of DNA ligated to RBam24 or REco24 obtained from the first round. The products of the second round of subtraction were radiolabelled en masse and used as probe in Southern hybridization experiments, in order to verify that the amplified fragments were indeed unique to the DNA of the B2 strain and absent from the strains of group A. Thus, four subtractive libraries were produced.

[0157] Analysis of clones from the subtractive libraries. The DNA of the subtractive libraries was cloned into the BamH1 (Sau3AI libraries) or EcoR1 (Tsp5091 libraries) sites of pUC19 (New England Biolabs, Beverly, Mass.), and then transformed into Epicurian coli XL2-Blue ultra-competent cells (Stratagene, La Jolla, Calif.). The inserts were amplified by PCR reactions carried out on transformed colonies, using the following primers: P1 (5′-CATGCCTGCAGGTCGACTCT-3′; SEQ ID NO: 158) and P2 (5′-CGTTGTAAAACGACGGCCAG-3′; SEQ ID NO: 159). The clones were named according to the following (in order): the restriction enzyme used (“Tsp” or “Sau” ), the strain used for the subtraction (E4 or E15) and an alphanumeric name.

[0158] (i) DNA sequencing. After purification of the PCR products by reversible immobilization on a solid phase, the purified PCR fragments were sequenced using the Big-Dye Terminator Cycle Sequencing Ready Reaction kit with AmpliTaq DNA polymerase (Perkin-Elmer), on an ABI PRISM 377 XL automatic DNA sequencer (Perkin-Elmer), according to the manufacturer's instructions. When problems in obtaining a sequence of good quality were encountered with a given primer, the sequencing reaction was carried out with the dGDT Big-Dye Terminator Cycle Sequencing Ready Reaction kit (Perkin-Elmer). The sequences were screened for homologies with already published sequences, using the BLASTN and BLASTX computer programs (National Centre for Biotechnology Information, NCBI, Altschul et al. 1997, Nucleic Acids Res. 25: 3389-3402).

[0159] (ii) Southern-blot hybridization. In order to verify their specificity, the PCR products obtained, using the P1 and P2 primers, from the transformant colonies were labelled by incorporating digoxygenin-11-dUTP (Boehringer, Mannheim), and used as probes for the Southern-blot analysis of the DraI-digested chromosomal DNA originating from the E. coli C5, ECOR4 and ECOR15 strains and the E. coli K-12 strain MG1655.

[0160] (iii) Pulsed-field gel electrophoresis and mapping of the clones on the chromosomes of the RS218 and C5 strains. The position of the DNA sequences corresponding to the difference products cloned was determined with respect to the map of E. coli RS218 (Rode et al. 1999, Infect. Immun. 67:230-236) by probing Southern transfers of pulse-field agarose gels. The DNA of the strain RS218 was digested with BlnI, NotI and XbaI, and subjected to pulsed-field gel electrophoresis, as was the DNA of the strain C5, which was digested with BlnI and NotI. The gels were 1% agarose in 0.5×Tris-borate-EDTA buffer, and they were subjected to electrophoresis at 6 V/cm for 27 h, with pulsed durations varying in a linear manner between 2 and 49 s. The positions on the RS218 chromosome of sequences which are reactive with each of the clones were determined by comparing the BlnI and NotI recognized restriction fragments with the published macrorestriction map (Rode et al. 1999).

[0161] Results

[0162] Production of libraries of DNA fragments of the strain C5 of group B2, which are not found in the genome of E. coli of group A. Using the technique of representational difference analysis, we subtracted the chromosomes of two strains of group A (ECOR4 and ECOR15) from the chromosome of the strain of group B2 (strain C5). Four libraries were produced and named SauE4, SauE15, TspE4 and TspE15, according to the enzyme used to digest the chromosome of the strain C5 and the strain used for the subtraction. In each case, the amplified difference product from the second round of subtraction was labelled and used as probe against the DraI-digested DNA of C5, RS218, ECOR4 and ECOR15. Strong reactivity with the chromosome of the strains of group B2 was observed. In addition, there was little or no signal in the lanes corresponding to the subtractive strains (group A). 494 of the clones obtained were isolated for sequencing. Among them, 140 exhibit significant homology with the sequence of E. coli K-12, and were eliminated. Among the 354 remaining fragments, 259 sequences (SEQ ID NO: 1 to NO: 153, and NO: 170 to NO: 253) were unique. Table 1 below shows all the clones which exhibit significant homology with genes described previously.

TABLE 1
Summary of the BLAST search for the C5+ A− clones which exhibit significant
homologies^{a}

| Clone^{b} SEQ ID NO: | Size of | Database sequences | | | GenBank Accession |
|---|---|---|---|---|---|
| 170 to NO: 253 | insert (bp) | exhibiting similarity^{c} | Score | Probability | No. |
| SauE15.A7 | 190 | iroC (N), ATP cassette transporter | 157 | e⁻³⁷ | U62129 |
| | | (locus regulated by | | | |
| | | iron), Salmonella enterica | | | |
| | | serovar Typhi | | | |
| SauE15.B2 | 294 | repB (N), replication protein, | 123 | e⁻²⁶ | AF053946 |
| | | plasmid pCD1, Yersinia pestis | | | |
| SauE15.B6 | 157 | kps (N), promoter region of | 242 | e⁻⁶² | U05251 |
| | | region 3 of the polysialic acid | | | |
| | | gene cluster, E. coli | | | |
| SauE15.B9 | 107 | traD (N), sex factor F plasmid, | 198 | e⁻⁵⁰ | M29254 |
| | | E. coli | | | |
| SauE15.B10 | 240 | ORF 34 and 35 (P), 102 kb | 69 | e⁻¹² | CAA21357 |
| | | unstable region, Y. pestis | | | |
| SauE15.B12 | 479 | Unknown protein (P), E. coli | 102 | e⁻²¹ | AF044503 |
| | | ec11 | | | |
| SauE15.C1 | 100 | r6 (N), transposase, | 198 | e⁻⁴⁹ | AF081285 |
| | | pathogenicity island of E. coli | | | |
| | | CFT073 | | | |
| SauE15.C6 | 119 | IS100 (N), Yersinia pestis | 228 | e⁻⁵⁸ | L19030 |
| SauE15.C7 | 155 | TonB-dependent HI1217 receptor | 52 | e⁻⁷ | P45114 |
| | | precursor (P), Haemophilus | | | |
| | | influenzae | | | |
| SauE15.C9 | 273 | rhuM (N), pathogenicity island | 311 | e⁻⁸³ | AF106566 |
| | | of Salmonella enterica serovar | | | |
| | | Typhimurium (SPI 3) | | | |
| SauE15.C11 | 77 | orfE (N), distal region of the | 129 | e⁻²⁹ | X55815 |
| | | tra operon promoter, plasmid | | | |
| | | R100, S. flexneri | | | |
| SauE15.D4 | 153 | IS100 (n), Y. pestis | 287 | e⁻⁷⁶ | L19030 |
| SauE15.D8 | 347 | r3 (N) , beta-cystathionase, | 615 | e⁻¹⁷⁴ | AF081286 |
| | | pathogenicity island of E. coli | | | |
| | | CFT073 | | | |
| SauE15.E4 | 281 | senB (N), enterotoxin E. coli | 541 | e⁻¹⁵² | Z54195 |
| SauE15.E11 | 314 | traJ, Y (N), plasmid R1-19, | 523 | e⁻¹⁴⁷ | M19710 |
| | | E. coli | | | |
| SauE15.F3 | 422 | chuA (P), gene for haem use, | 98 | e⁻²⁰ | U67920 |
| | | E. coli 0157: H7 | | | |
| SauE15.F9 | 137 | Thacesterase (P), Bacillus sp | 48 | e⁻⁶ | AB016427 |
| SauE15.F10 | 210 | r3 (N), beta-cystathionase, | 408 | e⁻¹¹² | AF081286 |
| | | pathogenicity island of E. coli | | | |
| | | CFT073 | | | |
| SauE15.G3 | 206 | traG (N), plasmid R100, S. | 165 | e⁻³⁹ | U01159 |
| | | flexneri | | | |
| SauE15.G6 | 328 | IS100 (N), Y. pestis | 480 | e⁻¹³⁴ | L19030 |
| SauE15.H5 | 200 | HMWP1 protein (P), Yersinia | 80 | e⁻¹⁵ | CAA73127 |
| | | enterocolitica | | | |
| SauE15.H7 | 150 | Oxidoreductase (P), Thermotoga | 160 | e⁻¹¹ | AE001762 |
| | | maritima | | | |
| SauE15.H10 | 141 | traT (N), plasmid R100, E. coli | 280 | e⁻⁷⁴ | J01769 |
| SauE15.H11 | 160 | Haemoglobin protease (p), | 50 | e⁻⁶ | CAA11507 |
| | | E. coli EB1 | | | |
| SauE15.I3 | 176 | asst (N), aryl sulphate sulpho- | 341 | e⁻⁹² | U32616 |
| | | transferase, Klebsiella sp. | | | |
| SauE15.I11 | 162 | chuA (N), gene for haem use, | 305 | e⁻⁸² | U67920 |
| | | E. coli 0157: H7 | | | |
| SauE15.J7 | 118 | troB (N), glucosyl transferase | 74 | e⁻¹² | U62129 |
| | | homologue S. typhi | | | |
| SauE15.J9 | 96 | IS100 (N), Y. pestis | 174 | e⁻⁴² | L19030 |
| SauE15.M4 | 193 | r3 and malX (N), pathogenicity | 383 | e⁻¹⁰⁴ | AF081286 |
| | | island of E. coli CFT073 | | | |
| SauE15.M8 | 149 | De1ta- (L- α-aminoadipyl) -L- | 65 | e⁻¹¹ | P26046 |
| | | cysteinyl-D-valine synthetase | | | |
| | | (P) Penicillium sp. | | | |
| SauE15.M12 | 119 | senB (N), enterotoxin of | 228 | e⁻⁵⁸ | Z54195 |
| | | enteroinvasive E. coli | | | |
| SauE15.N7 | 188 | Plasmid pColBM-C1139 (N), | 208 | e⁻⁵² | M35683 |
| | | E. coli | | | |
| SauE4.A2 | 321 | orf 36 (N), 102 kb unstable | 135 | e⁻³⁰ | AL031866 |
| | | region of Y. pestis | | | |
| SauE4.A5 | 249 | r3 (N), beta-cystathionase, | 355 | e⁻⁹⁶ | AF081286 |
| | | pathogenicity island of E. coli | | | |
| | | CFT073 | | | |
| SauE4.B4 | 360 | IS200 (N), E. coli | 523 | e⁻¹⁴⁷ | L25845 |
| SauE4.C7 | 275 | Hippurate hydrolase (P), | 54 | e⁻⁷ | P45493 |
| | | Campylobacter jejuni | | | |
| SauE4.C11 | 255 | Pristinamycin I synthetase (p), | 51 | e⁻⁶ | CAA67248 |
| | | Streptomyces spp. | | | |
| SauE4.D3 | 239 | hlyB, (N), haemolysin, E. coli | 474 | e⁻¹³² | M81823 |
| SauE4.E3 | 263 | shuX genes (N), genes for haem | 387 | e⁻¹⁰⁶ | U64516 |
| | | use Shigella dysenteriae | | | |
| SauE4.E11 | 242 | IS66 (N), E. coli | 329 | e⁻⁸⁸ | AF119170 |
| SauE4.F8 | 188 | sorC genes (N), sor operon for | 139 | e⁻³¹ | X66059 |
| | | L-sorbose use, Klebsiella | | | |
| | | pneumoniae | | | |
| SauE4.F9 | 439 | YfkN (P) Bacillus subtilis | 57 | e⁻⁸ | BAA23404 |
| SauE4.F12 | 324 | kpsM (N), region 3 of the | 642 | 0 | M57382 |
| | | polysialic acid gene cluster, | | | |
| | | E. coli K1 | | | |
| SauE4.H2 | 85 | sorM (N), sor operon for | 105 | e⁻²² | X66059 |
| | | L-sorbose use, K. pneumoniae | | | |
| SauE4.I2 | 431 | yihA, (N), plasmid R100, | 829 | 0 | AP000342 |
| | | S. flexneri | | | |
| TspE4.A5 | 271 | pap and prsK (N), pili | 498 | e⁻¹³⁹ | X61239 |
| | | P-protein, E. coli | | | |
| TspE4.A8 | 216 | 17 kD orf of the pili prs | 387 | e⁻¹⁰⁶ | X61238 |
| | | operon (N), cytoplasmic | | | |
| | | protein, E. coli | | | |
| TspE4.A9 | 179 | kpsT (N), region 3 of the | 347 | e⁻⁹⁴ | M57381 |
| | | polysialic acid gene cluster, | | | |
| | | E. coli K1 | | | |
| TspE4.A10 | 212 | HecB (P), putative transporter | 73 | e⁻¹³ | AAC31980 |
| | | of the haemolysin activator, | | | |
| | | Erwinia chrysanthemi | | | |
| TspE4.B1 | 229 | r1 (N), pathogenicity island of | 430 | e⁻¹¹⁹ | AF081286 |
| | | E. coli CFT073 | | | |
| TspE4.B5 | 215 | Sensory transduction histidine | 52 | e⁻⁷ | BAA18223 |
| | | kinase (P), Synechocystis sp. | | | |
| TspE4.B9 | 319 | senB (N), enterotoxin of | 617 | e⁻¹⁷⁵ | Z54195 |
| | | enteroinvasive E. coli | | | |
| TspE4.B12 | 430 | IS100 (N), Y. pestis | 698 | 0 | L19030 |
| TspE4.C10 | 267 | Intergenic capsular cluster (N) | 466 | e⁻¹²⁹ | AF118251 |
| | | of E. coli K42 | | | |
| TspE4.D2 | 232 | waaL (N), lipid A core of | 404 | e⁻¹¹¹ | AF019746 |
| | | E. coli : surface polymer ligase | | | |
| TspE4.D4 | 245 | orf 169 (N), plasmid F, E. coli | 456 | e⁻¹²⁶ | X17539 |
| TspE4.D10 | 222 | cnfl (N) cytotoxic necrosis | 440 | e⁻¹²² | X70670 |
| | | factor, E. coli | | | |
| TspE4.D11 | 217 | hlyB (N), haemolysin, E. coli | 422 | e⁻¹¹⁷ | M81823 |
| TspE4.E3 | 298 | hlyD (N), haemolysin, E. coli | 553 | e⁻¹⁵⁶ | M10133 |
| TspE4.E4 | 267 | orf 95 (N), plasmid F, E. coli | 482 | e⁻¹³⁴ | X17539 |
| TspE4.E6 | 190 | L-sorbose P reductase (P), | 112 | e⁻²⁵ | P37084 |
| | | K. pneumoniae | | | |
| TspE4.E8 | 285 | hlyB (N) haemolysin, E. coli | 541 | e⁻¹⁵² | M81823 |
| TspE4.G7 | 238 | tra (N), plasmid F, E. coli | 448 | e⁻¹²⁴ | X61575 |
| TspE4.G8 | 323 | Transmembrane protein (P), | 82 | e⁻¹⁵ | AAA92620 |
| | | E. coli | | | |
| TspE4.H1 | 283 | Arginine deiminase (P) | 63 | e⁻¹⁰ | P13981 |
| | | Pseudomonas aeruginosa | | | |
| TspE4.H9 | 179 | traT (N), plasmid R100, E. coli | 353 | e⁻⁹⁶ | J01769 |
| TspE4.H10 | 223 | prf and papI (N), adhesin | 418 | e⁻¹¹⁵ | X76613 |
| | | regulatory gene, E. coli | | | |
| TspE4.H11 | 279 | orf 9 (N) , plasmid F, E. coli | 456 | e⁻¹²⁷ | X17539 |
| TspE4.I10 | 269 | neuC (N), capsule gene cluster, | 492 | e⁻¹³⁷ | M84026 |
| | | E. coli | | | |
| TspE4.J1 | 327 | yhtA (N), plasmid R100, E. coli | 521 | e⁻¹⁴⁶ | AP000342 |
| TspE4.J6 | 221 | chuA (N), gene for haem use, | 375 | e⁻¹⁰² | U67920 |
| | | E. coli O157:H7 | | | |
| TspE4.K3 | 180 | iss (N), survival in serum, | 270 | e⁻⁷⁰ | AF042279 |
| | | E. coli | | | |
| TspE4.K8 | 184 | IS100 (N), E. coli prf and papB | 190 | e⁻⁴⁷ | L19030 |
| | | (N), E. coli | 143 | e⁻³² | X76613 |
| TspE15.A1 | 332 | Na⁺/H⁺antiporter (P), | 96 | e⁻²⁰ | Q57007 |
| | | H. influenzae | | | |
| TspE15.C1 | 299 | hra (N), heat-resistant | 537 | e⁻¹⁵¹ | U07174 |
| | | agglutinin, E. coli 99 | | | |
| TspE15.C3 | 386 | hcp (N), E. coli | 81 | e⁻¹⁴ | AF044503 |
| TspE15.D7 | 239 | STBA protein (P), plasmid NR1, | 87 | e⁻¹⁷ | P11904 |
| | | E. coli | | | |
| TspE15.D9 | 230 | chuA (P), gene for haem use, | 89 | e⁻¹⁸ | AAC44857 |
| | | E. coli O157:H7 | | | |
| TspE15.E7 | 360 | kpsS (N), region 1 of the | 531 | e⁻¹⁴⁹ | X74567 |
| | | capsule gene cluster, E. coli | | | |
| | | K5 | | | |
| TspE15.G12 | 287 | Putative aminotransferase (P), | 72 | e⁻¹² | Q08432 |
| | | B. subtilis | | | |
| TspE15.H2 | 258 | Pyruvate formate lyase | 51 | e⁻⁶ | AAB89799 |
| | | activation enzyme (P), | | | |
| | | Streptococcus mutans | | | |
| TspE15.H5 | 310 | cnfl (N) cytotoxic necrosis | 601 | e⁻¹⁷⁰ | U42629 |
| | | factor, E. coli | | | |
| TspE15.H9 | 273 | Major fimbrial subunit of | 48 | e⁻⁵ | I41206 |
| | | fimbriae resembling F17 (P), | | | |
| | | E. coli | | | |
| TspE15.I2 | 112 | prs and papE (N), pili-P | 222 | e⁻⁵⁷ | X62158 |
| | | protein, E. coli | | | |

^{a}Only the homologies with a probability of at least e⁻⁵ were selected. The homologies with bacterio-phages (n = 21) are not given.
^{b}The clones are named according to the name of the enzyme followed by the name of the strain used for the subtraction (E4 or E15) and a code composed of one letter and one number.
^{c}The name of the sequence of the gene is given (with the type of similarity between brackets), followed by the product or by the function which is encoded by the gene and/or the location of the gene, and also the name of the organism. N, similarity at the nucleotide level; P, similarity at the protein level; ORF, open reading frame.

[0163] Some of the clones correspond to genes which are already known to be present in the strain C5, such as pap, hly and kps. Among the 494 clones, none proved to be homologous to sfa or ibe10. Additional rounds of subtraction and/or the sequencing of additional clones make it possible to obtain greater exhaustiveness, until this is complete. In addition, sequences are found which correspond to virulence factors described in strains which, to date, have never been associated with neonatal meningitis: (i) prs, cnf and hra, all of which form part of a PAI (pathogenicity island) in the uropathogenic E. coli strain J96; (ii) chuA, a gene involved in the iron transport system and found in enterohaemorrhagic E. coli 0157:H7; and (iii) senB, a gene encoding an enterotoxin on the virulence plasmid of enteroinvasive E. coli and Shigella. Finally, 153 of the fragments sequenced (SEQ ID NO: 1 to NO: 153) exhibited no significant homology with any published sequence.

[0164] Mapping of the sequences specific for NMEC, on the chromosome of E. coli. The availability of a physical map of the chromosome of E. coli RS218 (Rode et al. 1999, Infect. Immun. 67: 230-236) made possible the investigation of the distribution of the sequences mentioned above. Of the 64 clones which were chosen for this purpose, 7 exhibit homology with known virulence factors (kps, hly, prs, hra, cnf1, chuA and senB) and 57 exhibit no known homology. These latter clones were chosen randomly from the TspE4 and SauE15 libraries. These two libraries were chosen because they contain most of the genes expected in the B2s (for example, pap, hly and kps), and were therefore considered to be sufficiently complete to be representative. All the clones exhibited homology, by Southern hybridization, with respect to the chromosome of the strain RS218. The PCR products of these clones were labelled and used to probe Southern transfers of RS218 DNA digested with the BlnI, NotI and XbaI enzymes (enzymes which cleave infrequently). The location of both sfa and ibe10 was determined. In order to evaluate the B2+ A− specificity thereof, each of these clones was used to probe the DraI-digested DNA of strains ECOR4, ECOR15 and MG1655: they proved to be nonreactive with respect to these strains.

[0165] The mapping of these clones revealed a non-random distribution of the C5+ A− sequences. This distribution is illustrated by FIG. 1. In this figure, the upper arrows indicate the six regions which were found in this study and which are represented by NotI and BlnI fragments with a high density of clones specific for C5. The clones exhibiting known homologies are indicated, as are the positions of the sfa and ibe10 probes. Region 6 was divided into two subregions according to the mapping of the clones on various XbaI fragments. The exponents next to the names of the clones indicate the following: 1, TspE4.A7 was positioned by SauE15.F12 overlap; 2, SauE15.F12 also exhibits reactivity on the plasmid; and 3, TspE4.A8 also exhibits weak reactivity on NotI fragment P.

[0166] Forty-four of the clones were clustered in six distinct groups on the chromosome. One clone encoding a portion of the chuA gene found in enterohaemorrhagic E. coli was not associated with any of these clusters and remained isolated. Region 1 is contained in BlnI fragment m (85 kb). The clones of region 2 were mapped on NotI fragments p and n (˜240 kb). Region 3 is contained in NotI fragment a (˜310 kb) and region 4 is contained in BlnI fragment h (210 kb). Region 5 is located on BlnI fragment j (135 kb). Region 6, which overlaps NotI fragment b and BlnI fragment b (˜550 kb), was divided into two subregions, regions 6a and 6b, with the XbaI enzyme. This latter subregion contains clones which exhibit homologies with Cnfl, hly, prs and hra. The sfa and ibe10 probes hybridize in regions 2 and 6a, respectively. The genes encoding the capsule were not linked to any of these regions. Six clones exhibiting no homology with known sequences and the senB gene were all located on a large plasmid present in the strain RS218.

[0167] Distribution of the C5+ A− genomic regions among two collections of E. coli strains. In order to refine the relevance of these regions in terms of diagnosis and pathogenesis, we determined the frequency of the appearance of clones located on regions 1, 3, 4, 5 and 6b, and also the clone containing a portion of the chuA gene, in a collection of 54 E. coli which were associated with neonatal meningitis and which belong to the phylogenic group B2 (54 NMEC). We excluded regions 2 and 6a from this study since they contain the sfa and ibe10 genes, as it has been possible to establish the distribution thereof among the E. coli strains of group B2. For each region, two to four clones were used independently to screen Southern transfers of the genomic DNA of NMEC isolates. The control group corresponded to the 15 B2 strains of the ECOR collection; the strains have not, to date, been associated with meningitis. The results are given in Table 2 below.

TABLE 2
Strains isolated from cases of neonatal meningitis and from the ECOR collection,
which hybridized with the subtractive clones used as probe
% of strains positive for hybridization by Southern transfer,
with given clones representive of various regions or homologous to chuA

| | | | | | | | | | | | (Region 6b) | | |
|---|---|---|---|---|---|---|---|---|---|---|---|---|---|
| | | (Region 1) | | (Region 3) | | (Region 4) | | (Region 5) | | | chuA | | |
| | | TspE4. | TspE4. | SauE15. | TspE4. | SauE15. | SauE15. | TspE4. | SauE15. | TspE4. | SauE15. | PAI | TspE4. |
| Source | n | K6 | H5 | M9 | H6 | L4 | K12 | C4 | M10 | C2 | N4 | V^{a} | J6 |
| Meningitis | 54 | 91^{b} | 91^{b} | 80^{b} | 80^{b} | 81^{b} | 81^{b} | 81^{b} | 100 | 98^{c} | 17^{b} | 17^{b} | 100 |
| belonging to the | | | | | | | | | | | | | |
| phylogenic group | | | | | | | | | | | | | |
| B2 | | | | | | | | | | | | | |
| ECOR collection, | 15 | 40 | 40 | 13 | 13 | 47 | 47 | 47 | 100 | 87 | 47 | 47 | 100 |
| phylogenic group | | | | | | | | | | | | | |
| B2 | | | | | | | | | | | | | |

^{a}The prevalence of PAI V was evaluated using clones TspE4.D11, TspE4.D10 and TspE15.C1, which are homologous to the hly, cnf1 and hra genes, respectively.
^{b}p < 0.05, with respect to the strains of the ECOR collection (the existence of a difference in the distribution of the clones studied was tested using the χ² test).
^{c}Nonsignificant, with respect to the strains of the ECOR collection.

[0168] All the regions mentioned above are widely present among the NMEC, except region 6b which is under-represented in the strains associated with meningitis. In addition, regions 1, 3 and 4 appeared with a frequency which was notably higher (p<0.05) among the NMEC than among the other B2 strains, thus suggesting that these regions contain DNAs encoding NMEC-specific factors. These regions, their portions and the clones which they contain therefore constitute a source of polynucleotides involved in neonatal meningitis. They can, therefore, be used as active principles in anti-neonatal meningitis vaccines, and allow the development of medicinal products intended to prevent, alleviate or treat neonatal meningitis using products which slow down or block the transcription and/or translation of these polynucleotides, or which slow down or block the activity of the polypeptides which they encode.

[0169] Discussion

[0170] In these studies, we carried out a subtractive hybridization in order to identify the regions of the chromosome which are capable of encoding phylogenic attributes of interest. We carried out two rounds of subtractive hybridization, choosing to subtract the DNA population of a B2 E. coli (E. coli C5 associated with neonatal meningitis) from that of E. coli strains of group A. We thus obtained libraries of C5+ A− clones containing inserts ranging from 100 to 500 bp long in which the specific NMEC clones could also be identified. Among the 259 clones representative of these libraries, 153 are novel as products (SEQ ID NO: 1 to NO: 153), the other fragments exhibit homology with known products. Among the fragments with homology, some are described for the first time as being of nature C5+ A−; this is in particular the case of chuA (ATCC Accession Number U67920) and of the four clones which appear to correspond to it: TspE4J6 (SEQ ID NO: 241, 221 bp, probability of e⁻¹⁰², score of 375), SauE15.I11 (SEQ ID NO: 195, 162 bp, probability of e⁻⁸², score of 305), SauE15.F3 (SEQ ID NO: 185, 422 bp, probability of e⁻²⁰, score of 98) and TspE15.D9 (SEQ ID NO: 248, 230 bp, probability of e⁻¹⁸, score of 89). It is also the case of the island PAIV, and of regions 1, 6a and 6b which were identified (cf. examples). The invention also demonstrates that these DNA fragments are not dispersed randomly on the chromosome of E. coli, and that there are chromosomal regions of E. coli which are of nature C5+ A− (regions 1, 2, 3, 4, 5, 6a and 6b).

[0171] The specificity of the subtractive libraries was evaluated (i) by Southern transfer with nonpathogenic strains, and (ii) by sequence analyses which showed 72% of the clones exhibit no homology with the published sequence of E. coli K-12. Some clones correspond to genes associated with virulence (kps, pap and hly). On the other hand, we have not isolated any clone corresponding to the sfa and ibe10 genes. However, clones derived from regions containing these two genes were obtained. Taken together, these data confirm the complete nature of these libraries.

[0172] In addition, while, in the examples described above, 494 clones were isolated for sequencing and made it possible to obtain 259 clones which are different from each other and which exhibit no significant homology with E. coli K12, it will become clearly apparent to those skilled in the art that the initial number of clones initially isolated and sequenced can, if desired, be considerably increased, for example by starting with 3000 clones or more instead of 494. Automatic sequencing machines make it possible to easily treat such a number of clones. Increasing the number of clones initially sequenced makes it possible, in particular, to increase the final set of clones which are different from each other and which exhibit no significant homology with E. coli K12. This makes it possible to increase the level of exhaustiveness of the set obtained. Alternatively, or in combination, it is possible to choose to increase the number of strains from which the DNA population originates (B2 E. coli) and/or to increase the number of subtractive libraries prepared (using other restriction enzymes). In order to increase the level of specificity obtained, it is possible to choose to multiply the subtraction cycles: in the example described above, only two cycles were necessary to obtain said 259 clones, but it is possible to choose to carry out a third or a fourth cycle. It is also possible to choose to use other restriction enzymes, any enzyme allowing fragments of approximately 100 to 1 500 bp, with a mean of approximately 300 to 500 bp, to be obtained being, a priori, the most suitable (i.e. any restriction enzyme having short restriction sites, for example 4 bp, such as Tsp509I or Sau3AI, and also MspI or MaeII). Advantageously, two to three rounds of subtraction followed by the elimination of those of the clones which exhibit homology with a strain of group A such as E. coli K12 gives a very good level of specificity. Varying the nature of the restriction enzymes used, in particular between each subtraction cycle, further increases the level of exhaustiveness and/or of specificity of the set obtained. In order to evaluate the level of exhaustiveness effectively obtained, this evaluation can be carried out by investigating the presence or absence of known markers such as sfa or ibe10.

[0173] In the C5+ A− set isolated herein, particularly discriminating DNAs can be identified (cf. Table 2 above): most of them (more than 80% of them) are in fact present in the E. coli of group B2 of the ECOR collection at a frequency greater than 40% (clones of regions 1, 4, 5 and 6b), some of them even being present at a frequency greater than 50%, or even greater than 80% (clones of region 5 and clones corresponding to chuA), reaching a B2 frequency of 100% for approximately 15% of the set obtained (some clones of region 5 and isolated clone corresponding to chuA).

[0174] Seven C5+ A− regions (regions 1, 2, 3, 4, 5, 6a and 6b) were also identified. An epidemiological approach was undertaken in order to study the role of these regions in the infectious process of NMEC (E. coli which it has been possible to associate with neonatal meningitis). Given that the majority of NMEC belong to the phylogenic group B2, we determined the prevalence of each region, and also of chuA, among NMEC of group B2, and among the strains of group B2 not associated with meningitis (ECOR collection). Although small, this control group was chosen since it is composed of reference strains from the ECOR collection, which is considered to be representative of the range of genotypic variations of the species. We used two to four clones of each region and the TspE4.J6 clone (SEQ ID NO: 241), a homologue of chuA, as probes against Southern transfers of genomic DNA prepared from isolates belonging to the two groups. The presence of this clone among the meningitis isolates indicates that all these regions, except region 6b, are widely represented among NMEC, thus suggesting the involvement of genes encoded by these regions in the pathogenesis of these strains. On the other hand, and surprisingly, region 6b, which resembles PAI V, has a low prevalence in NMEC (17%) but is widely represented in the strains of group B2 of the ECOR collection (47%). Region 5 has a high prevalence, but it is similar in both collections and may thus correspond to segments which are highly characteristic of the phylogenic group B2 with respect to the group A. Region 5 of E. coli thus appears to be an advantageous source of DNA fragments present in a great majority (more than 80%) of E. coli of group B2 of the ECOR collection, and absent from the majority of E. coli of group A of the ECOR collection. The same distribution was observed for chuA, but interestingly, these genes were present, without exception, in all the strains of group B2 tested. As regards regions 1, 3 and 4, they appear to be clearly more common in NMEC than in the other B2 E. coli . Given that regions 1, 3 and 4 do not, moreover, contain any known virulence factors, these regions appear to correspond to DNA islands associated with invasion of the meninges by E. coli in infants and newborn.

[0175] It may be noted that, in the prior art, the sequences of regions 1, 3, 4 and 5 were not available, that they had never been described or isolated and that no function was known for them. Regions 1, 3, 4 and 5 therefore appear to be novel. As regards regions 2, 6a and 6b, they comprise DNAs which were known as products, but this is the first description of the existence of such regions and the first description of their nature C5+ A−.

### EXAMPLE 2

[0176] Distribution of the C5+ A− Fragments Among the ECOR Strains

[0177] The frequency of presence of the fragments obtained in Example 1 (C5+ A− fragments) among ECOR E. coli of groups B1 and D was then measured by Southern hybridization as described in Example 1. The results obtained for 14 of them (SEQ ID NO: 56, 116, 43, 51, 141, 130, 45, 50, 52, 119, 127, 125, 55 and 37) are given in Table 3 below.

TABLE 3

| ECOR | PREVALENCE OF THE SUBTRACTIVE CLONES WITH NO HOMOLOGY, IN THE STRAINS | | | | | | | |
|---|---|---|---|---|---|---|---|---|
| COLLECTION | OF THE ECOR COLLECTION | | | | | | | |
| GROUPS | SAUE15-N6 | TSPE4-B2 | SAUE15-K10 | SAUE15-N6 | TSPE4-H6 | TSPE4-F6 | SAUE15-L4 | SAUE15-L11 |
| A n = 16 | 0 | 0 | 0 | 0 | 0 | 0 | 0 | 0 |
| B1 n = 16 | 0 | 3 | 0 | 0 | 0 | 0 | 0 | 0 |
| | | (18.75%) | | | | | | |
| B2 n = 115 | 13 | 11 | 9 | 2 | 2 | 4 | 7 | 15 |
| | (86.67%) | (73.55%) | (60%) | (13.33%) | (13.33%) | (26.67%) | (46.67%) | (100%) |
| D n = 12 | 0 | 0 | 0 | 0 | | 0 | 0 | 6 |
| | | | | | | | | (50%) |

| ECOR | PREVALENCE OF THE SUBTRACTIVE CLONES WITH NO HOMOLOGY, | | | | | |
|---|---|---|---|---|---|---|
| COLLECTION | IN THE STRAINS OF THE ECOR COLLECTION | | | | | |
| GROUPS | SAUE15-M10 | TSPE4-C2 | TSPE4-E7 | TSPE4-D8 | SAUE15-N4 | SAUE15-I12 |
| A n = 16 | 0 | 0 | 2 | 0 | 0 | 0 |
| | | | (12.5%) | | | |
| B1 n = 16 | 0 | 15 | 0 | 1 | 0 | 3 |
| | | (93.75%) | | (6.25%) | | (18.75%) |
| B2 n = 115 | 15 | 12 | 12 | 10 | 7 | 15 |
| | (100%) | (80%) | (80%) | (66.67%) | (46.67%) | (100%) |
| D n = 12 | 3 | 2 | 3 | 0 | 1 | 12 |
| | (25%) | (16.67%) | (25%) | | (8.33%) | (100%) |

Between brackets: Frequency of the clone among the ECOR group under consideration (percentage of strains of this ECOR group in which the clone is present).

[0178] It is observed that the vast majority of the fragments tested (more than 90%) are absent (frequency of presence 0%) from the 16 E. coli strains of group A which the ECOR collection contains, and that they are all present at a frequency greater than 10% in the 15 E. coli strains of group B2 which the ECOR collection contains. More than 75% of the fragments are present in the 15 ECOR E. coli strains of group B2 at a frequency greater than 40%, 50% of them are present therein at a frequency greater than 70% and approximately 35% of them are present therein at a frequency greater than or equal to 80%.

[0179] It is also observed that some of these fragments are also present in ECOR E. coli strains of groups B1 and/or in ECOR E. coli strains of group D. It is in particular noted that the TspE4.C2 clone (SEQ ID NO: 119) is present in the ECOR E. coli of group B1 at a frequency greater than 90%, while at the same time being completely absent from the ECOR E. coli of group A. The SauE15.12 clone (SEQ ID NO: 37) is, itself, present with a frequency of 100% in the ECOR E. coli of group D and with a frequency of 100% in the ECOR E. coli of group B2, while at the same time being completely absent from the ECOR E. coli of group A and barely present in the ECOR E. coli of group B1.

[0180] All the fragments tested herein have in common the fact that they are present at a frequency greater than 10% in the ECOR E. coli of group B2 and at a frequency of less than 25%, particularly less than 10% and notably less than 5% in the ECOR E. coli of group A.

[0181] Since the ECOR collection represents the genetic diversity of the E. coli species, the various results obtained indicate that the set of DNAs isolated according to the invention constitute, taken alone or in combination, particularly suitable tools for the phylogenic identification of E. coli strains.

[0182] In order to further refine knowledge of the phylogenic distribution of the isolated fragments, the epidemiological study was pursued for several other C5+ A− clones. The results are given in Table 4 below (groups A, B1, B2 and D, group X including the 4 strains of the ECOR collection which are not assigned to any of these 4 groups).

TABLE 4

| | | ECOR | | | (n = 72) | |
|---|---|---|---|---|---|---|
| | SEQ ID | A | B1 | B2 | D | X |
| Clone | NO | n = 25 | n = 16 | n = 15 | n = 12 | n = 4 |
| SauE15.B10 | 174 | 4 | 0 | 0 | 41.7 | 0 |
| SauE4.A2 | 202 | 4 | 0 | 0 | 41.7 | 0 |
| SauE15.C7 | 178 | 4 | 0 | 0 | 41.7 | 0 |
| | 221 | 4 | 0 | 0 | 41.7 | 0 |
| TspE4.B9 | | | | | | |
| TspE15.G6 | 102 | 12 | 0 | 53.3 | 83.3 | 0 |
| SauE4.C11 | 206 | 0 | 0 | 66.7 | 0 | 0 |
| SauE4.E6 | 71 | 0 | 0 | 66.7 | 0 | 0 |
| TspE4.A11 | 114 | | | | | |
| SauE15.C12 | 13 | 0 | 0 | 100 | 66.7 | 0 |
| SauE4.G11 | 77 | | | | | |
| SauE15.A12 | 8 | 0 | 0 | 93.3 | 16.7 | 0 |
| SauE15.B12 | 175 | 0 | 12.5 | 93.3 | 0 | 0 |
| SauE15.J7 | 196 | 0 | 18.75 | 73.3 | 0 | 50 |
| SauE15.A7 | 170 | | | | | |
| SauE15.I8 | 36 | 0 | 0 | 13.3 | 0 | 0 |
| TspE4.C3 | 120 | 24 | 43.75 | 86.7 | 66.7 | 25 |
| TspE4.F6 | 130 | 0 | 0 | 26.7 | 0 | 0 |

[0183] It can be observed that, as for the fragments previously tested, the majority of the fragments are present at a frequency greater than 10% in the E. coli of group B2 and at a frequency of less than 10% in the E. coli of group A. It can in particular be noted that the SauE15.C12, SauE15.A12 and SauE15.B2 clones are present at a frequency of 100%, 93.3% and 93.3%, respectively, in the ECOR E. coli of group B2, and that all three of them are present at a frequency of 0% in the ECOR E. coli of group A.

[0184] One clone, TspE15.G6, is however present at a frequency of 12% in the E. coli of group A, at a frequency of 53.3% in the ECOR E. coli of group B2, and at a frequency of 83.3% in the ECOR E. coli of group D.

[0185] Four other clones, namely SauE15.B10, SauE4.A2, SauE15.C7 and TspE4.B9 appear, themselves, not to be present in the ECOR E. coli of group B2; these clones are, however, present at a frequency greater than 10% in the ECOR E. coli of group D (41.7%), and at a frequency of less than 10% in the ECOR E. coli of group A (4%).

[0186] The choice of the E. coli strain C5 as the strain of group B2 for the subtractive hybridization which enabled the isolation of these fragments (cf. Example 1 above) is probably not unrelated to these results. The E. coli strain C5, although belonging to the phylogenic group B2, in fact comprises a plasmid some sequences of which are also present in E. coli of group D (frequency of 41%).

[0187] The choice of such a strain for isolating the set of fragments which are very generally absent from the ECOR E. coli of group A therefore makes it possible to isolate the entire set of fragments which are present with greater frequency in the ECOR E. coli of group B2 and/or D, with respect to the ECOR E. coli of group A. The majority of the fragments tested are, moreover, completely absent from the ECOR E. coli of group A. When their frequency of presence among the ECOR E. coli of group A is not zero, it remains low (maximum measured for the fragments of this example=24%), and it is always less, by a factor of approximately 3 or 4, than the frequency observed either in the ECOR E. coli of group B2 or in the ECOR E. coli of group D, or in each of them.

[0188] Since the extra-intestinal pathogenicity of E. coli is associated with strains of group B2 or D, and not with strains of group A, the fragments isolated in accordance with the invention using a B2/D E. coli strain such as E. coli C5 have, in addition to phylogenic diagnostic applications (cf. Example 5 below) , applications of particular value for preventing, alleviating and combating any extra-intestinal development of E. coli (systemic and nondiarrhoeal development).

[0189] This being so, it will become clearly apparent to those skilled in the art that the examples reported herein with the E. coli strain C5 can be carried out in a similar manner with another E. coli strain of B2/D type, such as RS218, such as E. coli CFT073, and/or with a D strain.

[0190] In conclusion, the results obtained show that the C5+ A− fragments isolated in accordance with the present invention are present in the ECOR E. coli of group A at a frequency lower than that which can be observed in the ECOR E. coli of group B2 and/or in the ECOR E. coli of group D (=nature B2/D+ A−).

[0191] Their frequency of presence in the ECOR E. coli of group A is generally zero; if this is not the case, it is lower than that observed in the ECOR E. coli of group B2 and/or D by a factor which is at the very least 2, preferably 3, more preferably 3.5, and very preferably 4. This B2/D+ A− set according to the invention in particular comprises mostly fragments which are present at a frequency greater than 10% in the ECOR E. coli of group B2 and/or D, and at a frequency of less than 25%, preferably 20%, more preferably 10%, and even more preferably 5%, in the ECOR E. coli of group A (with the proviso that this A frequency is always lower than that in the B2s and/or Ds).

[0192] The present invention also provides means which give access to the entire set of these polynucleotides which are of nature B2/D+ A−.

### EXAMPLE 3

[0193] Example of Medical Application of the B2/D+ A− Fragments Isolated (Systemic and Non-diarrhoeal Development of E. coli in an Extra-intestinal Compartment)

[0194] Since the B2/D+ A− E.coli are those which are particularly responsible for extra-intestinal infections, we attempted to determine whether some of the B2/D+ A− fragments thus isolated were, in fact, involved in a step essential to the extra-intestinal infectious process of E. coli, namely survival and multiplication in the blood.

[0195] The approach used is that of differential transcriptional analysis (DTA) which consists in revealing the transcripts induced during this step. In order to also determine which characteristics of the serum are responsible for the variation of the level of gene expression of E. coli, the DTA was carried out under the following growth conditions:

[0196] the nutrient broth constitutes the control,

[0197] the bacteraemia phase is compared to the growth of the bacterium in the presence of human serum,

[0198] the iron deficiency which the culturing in serum induces is reproduced using a culture in nutrient broth supplemented with an iron chelator,

[0199] the effect of the complement is studied using growth in the presence of decomplemented serum.

[0200] Comparison of the transcriptomes obtained under each of these culture conditions makes it possible to reveal the genes specifically involved in the growth in serum, and to produce a functional group of the genes subjected to the same regulatory factor, such as iron content or stress induced by the bactericidal activity of the serum.

[0201] Materials and Methods

[0202] 1. Bacterial Strains, Culture Media and Subtractive Clones

[0203] The E. coli strain C5 (serotype O18:K1:H7) was isolated from the CSF of a newborn. This virulent strain belongs to the phylogenic group B2 and exhibits the following virulent factors: The K1 capsular polysaccharide, S adhesin, Ibe10 invasin, the type P pilus and haemolysin, but does not produce aerobactin. The subtractive fragment library was obtained using the C5 strain. The nonpathogenic strains used were the E. coli K12 strain MG1655 and the strain ECOR15 belonging to the so-called nonpathogenic phylogenic group A, originating from the ECOR reference collection.

[0204] The bacterial inocula were prepared from 18 h cultures on tryptocasein-soybean agar (Sanofi Pasteur), with the colonies being resuspended in sterile water. After measuring the OD, this bacterial suspension, pure or diluted, was used to prepare the inoculum in the various culture media, adding a volume which was always less than 1/10th of the final volume.

[0205] The bacterial cultures were prepared at 37° C. with shaking, using either pure nutrient broth (Sanofi Pasteur) or nutrient broth supplemented with an iron chelator: 2,2′-dipyridyl (Sigma) at a concentration of 200 μM. The bacterial strains were also cultured in the presence of human serum. Two types of serum were obtained: one consisting of a pool of 4 sera originating from donor blood, the other corresponding to a single donor. The serum was collected after harvesting the blood in a dry tube, spontaneous coagulation for approximately 3 hours at room temperature, and then decanting. The serum was then stored in the form of 2.5 ml aliquots at −80° C. Decomplemented serum was obtained, from the pool, after incubation at 56° C. for 30 minutes.

[0206] The subcultures of the clones of the B2/D+ A− library were prepared in nutrient broth enriched with ampicillin (50 μg/ml) at 37° C.

[0207] 2. Study of the Bactericidal Effect of the Serum

[0208] In order to evaluate the resistance of the E. coli strain C5 to the bactericidal effect of the serum, on the one hand, and the intact activity of the complement in the serum, on the other hand, growth curves were produced. The bacterial growth was analysed by taking various inocula of the strains ECOR15, K12 and C5, and carrying out bacterial counts of cultures in pure serum or in decomplemented serum. These counts were taken at times corresponding to 0 h, 3 h, 6 h and 24 h, by plating out pure or serially diluted cultures on Petri dishes using a “spiral meter” system.

[0209] 3. Amplification of the Subtractive DNA Fragments Specific for E. coli K1 and Manufacture of the High Density Membranes

[0210] a. PCR of the Subtractive DNA Fragments

[0211] The subtractive DNA fragments cloned into the plasmid pUC19 were amplified by PCR reaction, without DNA extraction, directly from a 1/10th dilution of an 18 h culture broth of each clone. 5 μl of this bacterial solution were added to the reaction mixture, with a final volume of 50 μl, comprising: 1×PCR buffer (10 mM Tris-HCl pH 9; 1.5 mM MgCl2; 50 mM KCl; 1% Triton X100; 0.1% gelatin); 2U SuperTaq polymerase (ATCG Biotechnologie); 200 μM deoxynucleotide triphosphates; 6 μM specific primers. The primers used were as follows: P1 (5′-CATGCCTGCAGGTCGACTCT-3′; SEQ ID NO: 728), P2 (5′-CGTTGTAAAACGACGGCCAG-3′; SEQ ID NO: 729). The PCR reaction consisted of 30 cycles: 30 s at 95° C. (denaturation), 30 s at 55° C. (hybridization) and 30 s at 72° C. (elongation).

[0212] b. Preparation of the High Density Membranes

[0213] Membranes comprising the set of specific amplified fragments of the E. coli strain C5 were manufactured by the company Eurogentec. 180 nl of each of the PCR products were deposited in duplicate, in the form of microspots, onto 6 cm by 11 cm nylon membranes. In order to be able to normalize the signals recorded for each reverse transcript, spots consisting of 4-fold serial dilutions of the chromosomal DNA of the E. coli strain C5, on the one hand, and of dilutions of the product of a PCR of the 16S rRNA, on the other hand, were deposited. In addition, a negative control corresponding to the PCR product of a subtractive fragment of 17 bp was also deposited. These membranes are conserved sealed, at +4° C.

[0214] 4. Synthesis of the ³³P-labelled Reverse Transcripts

[0215] a. Extraction of the Total RNA

[0216] In order to prevent degradation of the RNA by RNAses, all the extraction steps were carried out in ice, using gloves and RNAse-free material. The RNA is extracted from a bacterial pellet obtained after centrifugation (4 700 rpm at 4° C. for 3 min) of 5 ml of a 4-hour culture (approximately 10⁸ CFU/ml).

[0217] For the purpose of evaluating the influence of the extraction method, two techniques were used to extract the total RNA: the TRIZOL reagent and the BIORAD kit.

[0218] TRIZOL reagent (Gibco BRL): this reagent consists of a monophasic solution of phenol and of guanidine isothiocyanate, which allows extraction of the total RNA in a single step according to the method developed by Chomczynski and Sacchi. The bacterial cells are lysed by adding the TRIZOL reagent, vortexed for 30 s and subjected to a heat shock (incubation at 65° C. followed by freezing at −80° C.). The following steps are those of a conventional phenol-chloroform extraction. Finally, the recovered aqueous phase contains the RNA.

[0219] BIORAD kit: this kit contains no phenol-based solution. It consists in using a solution which allows the cells to be lysed during an incubation at 65° C. for 5 minutes. Next, a solution for precipitating the DNA and the proteins makes it possible to then recover the RNA which is in the aqueous phase.

[0220] For these two methods, the subsequent steps of precipitation and solubilization of the RNA are identical. The RNA is precipitated using isopropanol: the isopropanol is added to the aqueous solution containing the RNA, volume for volume. This mixture is incubated at −20° C. for approximately 15 h, and after centrifugation (13 000 rpm at 4° C. for 5 min), the RNA is obtained in the form of a pellet. The RNA is then washed with 70% ethanol and precipitated by centrifugation (13 000 rpm at 4° C. for 2 min). Finally, the RNA is solubilized in water in the first case (TRIZOL) or in a rehydration solution in the second case (BIORAD). The RNA samples are stored at −80° C.

[0221] b. Analysis of the RNA Samples Obtained

[0222] RNA Assay and Purity

[0223] The RNA is assayed using a spectophotometer, by measuring the absorbance at 260 nm, it being known that an optical density value at 260 nm corresponds to an RNA concentration of 40 μg/ml. The purity of the sample is estimated by calculating the OD_{260 nm}/OD_{280 nm} ratio: a ratio greater than 1.6 reflects an acceptable purity.

[0224] RNA Quality

[0225] Approximately 0.3 μg of RNA is analysed by 2% agarose gel electrophoresis—80 volts. The image obtained allows mainly the visualization of the bands corresponding to the 23S rRNA and the 16S rRNA, and a band corresponding to the 5S RNA and to the transfer RNAs (cf. figure), if the RNA preparation obtained is of good quality.

[0226] c. Synthesis of the ³³P-labelled cDNA Probe

[0227] The cDNA probe is synthesized using random priming. 10 μg of RNA are mixed together, in a final volume of 50 μl, with 10 μg of random hexamers; dATP, dTTP and dGTP, final concentration of 10 μM (Boehringer Mannheim); 40 U of Rnasin ribonuclease inhibitor (Promega); 1×RT buffer; 10 μg of bovine serum albumin (Promega). This reaction mixture is incubated at 50° C. for 5 minutes so as to linearize the mRNAs, and then brought back to +4° C. in ice. Finally, 100 U of M-MuLV Reverse Transcriptase (New England Biolabs) and 50 μCi of [α-33P]dCTP (Amersham Pharmacia Biotech) are added. Finally, this reaction mixture is incubated at 37° C. for 2 hours.

[0228] 5. Molecular Hybridization

[0229] Prehybridization

[0230] Initially, the membrane is prehybridized in 5 ml of Church and Gilbert hybridization buffer (0.5 M NaPi, pH 7.2; 1 mM EDTA; 0.7% SDS) for a minimum of 30 minutes at 65° C.

[0231] Hybridization

[0232] After having been denatured (5 min at 95° C.) , the ³³P-labelled cDNA probe is directly added to 5 ml of hybridization buffer. The hybridization reaction is carried out at 65° C. for 15 to 18 h.

[0233] Washing

[0234] The membrane is first rinsed twice with washing buffer (40 mM NaPi, pH 7.2; 1 mM EDTA; 1% SDS). Then, four washing steps are carried out (30 min at 65° C.).

[0235] Exposure

[0236] Once wrapped in Saran (food film-wrap), the membrane is exposed to a ³³P-sensitive screen (Molecular Dynamics) for 48 h to 90 h.

[0237] Dehybridization

[0238] The membrane is incubated twice for 15 min at 37° C. in the presence of a solution of 0.2N NaOH and 0.1% SDS, and then it is rinsed with distilled water for 5 min.

[0239] 6. Analysis of the Transcriptomes

[0240] Data Acquisition

[0241] The exposed ³³P-sensitive screen is scanned using a PhosphorImager (Storm 840, Molecular Dynamics) with a pixel size of 50 μm, and then the image obtained is analysed using the XdotsReader software (Cose). This software allows automatic recognition of the spots and is capable of calculating the pixel-density for each of the spots. It also makes it possible to subtract the background noise and to normalize the signal intensity. For each spot, the local background noise was subtracted and the signal intensity was normalized using the signal of the chromosome diluted 400-fold.

[0242] Data Analysis

[0243] First, the disparity between two spots from the same clone was calculated in order to eliminate the spots with a significant disparity, reflecting aberrant signals. Then, the mean of the intensity of the signals from a same pair was defined, and it is this mean intensity, net (after subtraction of the local background noise) and normalized, which will be considered for the data analysis. The intensity obtained for the 17 bp clone made it possible to define a positivity threshold, the signals lower than this intensity being considered as negative or “undetected”.

[0244] Results

[0245] 1. Validation of the Model for Studying the Bactericidal Effect of the Serum

[0246] Ability of E. coli C5 to multiply in serum. The growth curves produced with an inoculum of 10⁷ CFU/ml for the E. coli strain C5 responsible for neonatal meningitis, and the nonpathogenic E. coli strains K12 and ECOR15, show that, in the presence of human serum, E. coli C5 is capable of surviving and of multiplying, whereas as E. coli strain K12 is killed in less than 2 hours and the strain ECOR15 experiences a decrease in growth of more than 2 logs in 2 hours, persisting at a level of between 10⁴ and 10⁵ CFU/ml. At a lower inoculum (10³ or 10⁵ CFU/ml), the strain C5 persists without growing for the first two hours of culturing, and then experiences a growth of 1 log in the 4th hour. The inoculum of 10⁷ CFU/ml was therefore selected for the transcriptome study.

[0247] In decomplemented serum, the growth of the strains K12 and ECOR15 is similar to that of the strain C5, which suggests that the bactericidal effect observed was due to the lytic activity of the complement.

[0248] In order to determine whether or not the survival of the strain C5 between 2 h and 6 h of culturing was due to the modification of the complement at 37° C., growth curves for the strain K12, in the presence of serum incubated beforehand at 37° C. for 2 h, 4 h and 6 h, were produced. The results of this experiment demonstrate that the serum still possesses its bactericidal activity, even after having been pre-incubated for 6 h at 37° C.

[0249] 2. Isolation of the RNAs and Comparison of the Two Extraction Methods

[0250] Since the RNA extraction step is a fundamental step of the DTA, it appeared to us to be necessary to compare two extraction methods in order to determine whether or not the mode of extraction could have an influence on the transcriptome results. Preparations of good quality are characterized by the presence of the 23S, 16S and 5S rRNAs, detected in the form of clear bands by agarose gel electrophoresis. The RNAs extracted with the Biorad kit and the Trizol reagent, from a nutrient broth culture supplemented with dipyridyl, were analysed on 2% agarose gel under nondenaturing conditions. The bands obtained for the 23S and 16S rRNAs, and a band corresponding to the 5S rRNA and to the tRNAs reflect the good quality of the RNA preparations and of the equivalence of the extraction methods. In addition, the detection of RNA of low molecular weight shows that the extraction method makes it possible to isolate the mRNAs which are small in size, unlike other systems and in particular those using columns which retain only the mRNAs longer than 200 bp. However, a high molecular weight band corresponding to the chromosomal DNA appears clearly on the lane of the RNA obtained using the Biorad kit. The two transcriptomes obtained from these two types of RNA were compared visually (without integrating the signals), and appear to be identical. These results suggest the absence of an influence of the extraction methods and, in particular, of the contaminant chromosomal DNA. The latter point was, moreover, confirmed by carrying out a comparison between a probe obtained using Biorad RNA, with and without DNAse treatment.

[0251] 3. Differential Expression of the Transcripts Corresponding to the DNA Fragments Specific for E. coli K1 Responsible for Neonatal Meningitis

[0252] The transcriptomes obtained by hybridization of the reverse transcripts originating from E. coli C5, under two different culture conditions, on the high density membranes comprising the set of clones of the B2/D+ A− library were analysed with the aid of the Cose software, using the 400-fold dilution of the chromosome as the normalization spot, the signal of which is close to the median of all of the signals. It appears clearly that a certain number of spots are lacking in signals. In order to determine objectively the reverse transcripts which will be considered to be negative or “undetected”, the normalized intensity recorded on the 17 bp clone (0.05) was used. In order to be safe, this threshold was doubled and, therefore, any spot with an intensity of less than 0.1 was considered to be “undetected”.

[0253] The normalized intensities of the signals obtained for all the clones for which the transcript was detected under at least one of the culturing conditions make it possible to visualize the level of transcription of the set of subtractive clones in the course of the three respective experimental conditions: growth in nutrient broth, in nutrient broth supplemented with 2,2′-dipyridyl (iron chelator) and in serum. It is noted that most of the signals detected have similar intensities whatever the culturing conditions, whereas certain fragments exhibit levels of transcription which vary by a factor of ten according to the culturing conditions. These results therefore suggest good reproducibility of the technique, with a capacity to detect different transcriptional levels.

[0254] The transcriptome obtained in nutrient broth was considered to reflect the basal level of transcription of the bacterium in favourable medium. The expression profile obtained under conditions of stress consisting of culturing in serum was analysed with respect to this control transcriptome. In addition, the transcriptomes obtained when culturing in nutrient broth and iron chelator were also prepared, in order to determine the respective roles of iron deficiency and of complement in the serum.

[0255] Table 5 below gives the ratios of the intensities of the signals obtained for some of the clones of the B2/D+ A− library under the various experimental conditions, with respect to the control condition represented by the growth in nutrient broth (NB). Overall, it appears that the transcripts induced in the serum (ser) are most commonly also induced in the presence of dipyridyl (dip) and of decomplemented serum (DC serum), with the exception of the SauE15.A12, SauE4.E6, SauE4.C11 and TspE15.G6 clones.

[0256] It is interesting to note that these four clones have transcripts induced by serum factors other than iron deficiency, since their level of transcription is not modified, or even decreased, in the presence of dipyridyl (cf. Table 5). The transcription of two of these clones (SauE15.A12 and SauE4.C11) is not induced in decomplemented serum, and they therefore represent genes which are excellent candidates for complement resistance.

TABLE 5

| | | RATIOS | | |
|---|---|---|---|---|
| Clone | SEQ ID NO: | ser/NB | dip/NB | DC serum/NB |
| SauE15.B10 | 174 | 3.58 | 2.04 | 2.72 |
| SauE4.A2 | 202 | 10.58 | 13.09 | 10.57 |
| SauE15.C7 | 178 | 12 | 3.86 | 9.58 |
| TspE4.B9 | 221 | 6.03 | 2.72 | 7.57 |
| TspE15.G6 | 102 | 2.22 | 0.08 | 1.72 |
| SauE4.C11 | 206 | 2.46 | 0.84 | 1.25 |
| SauE4.E6 | 71 | 3.27 | 0.44 | 2.76 |
| TspE4.A11 | 114 | 1.82 | 0.74 | 1.54 |
| SauE15.C12 | 13 | 2.65 | 3.35 | 3.34 |
| SauE4.G11 | 77 | 1.78 | 1.09 | 1.07 |
| SauE15.A12 | 8 | 4.58 | 1.08 | 1.26 |
| SauE15.B12 | 175 | 2.81 | 1.77 | 1.62 |
| SauE15.J7 | 196 | 3.06 | 1.71 | 3.14 |
| SauE15.A7 | 170 | 17.45 | 6.62 | 14.82 |
| SauE15.I8 | 36 | 1.99 | 0.11 | 1.24 |
| TspE4.C3 | 120 | 1.96 | 2.26 | 1.39 |
| TspE4.F6 | 130 | 2.22 | 0.69 | 1.45 |

[0257] Reproducibility:

[0258] In order to verify the reproducibility of the technique and to demonstrate that the differences in transcription level detected are not linked to factors specific to the pool of serum used, a new probe was prepared from a culture of E. coli C5 in a serum originating from a single donor. The transcriptome obtained with this new probe was compared with the transcriptome produced with the pool consisting of several sera. The straight line of regression obtained, and also the regression coefficient with a value of 0.85, indicate the excellent reproducibility of the technique.

[0259] Relationship Between the Normalized Intensity and the Amount of Reverse Transcripts:

[0260] With the aim of verifying that there is indeed a linearity between the normalized intensity and the amount of reverse transcripts, the intensities obtained for the chromosomal range points consisting of 1/100th, 1/400th and 1/1600th dilutions were recorded on a graph. The graph obtained shows the existence of a linear relationship between these values, making it possible to deduce an induction factor directly from the normalized intensities recorded.

[0261] Conclusion

[0262] It appears, therefore, that the DTA technique described herein is a reliable method for selecting, from the B2/D+ A− library obtained from E. coli C5, DNA fragments the transcription of which is increased in the presence of serum. These fragments make up genes which participate specifically in the systemic and non-diarrhoeal extra-intestinal development of E. coli in humans and animals. These genes can be isolated using said DNA fragments the transcription of which is increased in the presence of serum, according to conventional techniques of those skilled in the art (cf. Example 6).

[0263] These fragments and the genes which bear them can be used as active principles (in the form of naked DNA placed under the control of a eukaryotic promoter or in the form of DNA transfected into a cell) in a vaccine composition intended to prevent, alleviate or combat the systemic and non-diarrhoeal development of E. coli in a human or animal extra-intestinal compartment. For this purpose, these fragments and genes can, if desired, be modified, for example so as to produce inactivated isogenic mutants.

[0264] The polypeptides which they encode can also be used in such vaccine compositions, in an inactivated and immunogenic form.

[0265] These DNA fragments and these genes can also be used as anti-pathogenicity targets (with the objective of preventing the development of E. coli in an extra-intestinal area, and not in the intra-intestinal area): they allow the identification of compounds capable of specifically inhibiting their transcription and/or translation, or of compounds capable of inhibiting the activity of the proteins encoded by these genes. Such compounds can be used as active principles in pharmaceutical compositions (medicinal products) in order to prevent, alleviate or treat the systemic non-diarrhoeal development of E. coli in a human or animal extra-intestinal compartment.

[0266] Among the fragments which are of nature B2/D+ A−, and the transcripts of which are increased in the serum, those which are not present in E. coli which are agents of infections localized in the intestine, such as E. coli O157:H7, are more particularly preferred.

[0267] A systemic non-diarrhoeal development of E. coli in an extra-intestinal compartment is in particular observed in the context of diseases such as neonatal meningitis, septiceamias, sepsis or pyelonephritis. Such vaccines and pharmaceutical compositions are particularly useful in the context of hospital-acquired infections. Such vaccines are most particularly valuable for the vaccination of women (from adolescent to adult, and more particularly before and during a gestation period) as a prevention against pyelonephritis, in order to avoid contamination of the newborn during birth.

[0268] The vaccines and pharmaceutical compositions according to the invention are therefore particularly suitable for such pathologies.

[0269] The present invention is therefore aimed towards any polynucleotide capable of being obtained:

[0270] by subtractive hybridization of an E. coli strain of group B2 or D against one or more E. coli strains of group A,

[0271] isolation of the substraction DNA fragments, and

[0272] selection of those for which transcription is stimulated in the presence of serum, with respect to a standard nutrient medium.

[0273] The DNAs given in Table 5 above are examples of such polynucleotides.

[0274] The present application is thus aimed towards:

[0275] any vaccine composition comprising such a polynucleotide, or an inactivated isogenic mutant of such a polynucleotide (inactivation of the possible pathogenic potency), in particular for preventing, alleviating or combating the development (systemic and non-diarrhoeal) of E. coli in a human or animal extra-intestinal compartment,

[0276] any pharmaceutical composition comprising a compound capable of inhibiting the transcription and/or translation of such a polynucleotide or mutant, or capable of inhibiting the activity of a polypeptide encoded by such a polynucleotide or mutant.

[0277] The present invention is also aimed towards a method for identifying compounds which can be used as active principles in a pharmaceutical composition (medicinal product) intended to prevent, alleviate or combat the development (systemic and non-diarrhoeal) of E. coli in a human or animal extra-intestinal compartment. This method comprises detecting and selecting compounds capable of inhibiting the transcription and/or translation of said polynucleotides, or capable of inhibiting the activity of the polypeptides which they encode. The present invention is also aimed towards any kit suitable for the implementation of this method, said kits comprising at least one of said polynucleotides or polypeptides. Any transgenic cell and any non-human transgenic animal, into which at least one of said polynucleotides or inactivated isogenic mutant has been transfected, also enter into the domain of the present application. Such cells and transgenic animals are particularly useful for selecting active principles of interest.

### EXAMPLE 4

[0278] Production of the Sequences of the B2/D+ A− Regions

[0279] In Example 1, the isolation and the sequence of 259 DNA fragments which are of nature B2/D+ A− (153 of which are novel as products) are described, and means for producing the entire set of these products are provided.

[0280] Those skilled in the art will appreciate that, using these DNA fragments, the sequence of each of regions 1, 2, 3, 4, 5, 6a and 6b described, and ORFs which correspond to them, can be identified, isolated and sequenced.

[0281] Example 1 and FIG. 1 give the sequence of eight (novel) fragments belonging to region 1 (SEQ ID NO: 134, 144, 109, 115, 140, 135, 33 and 56). For region 2, 5 novel fragments (SEQ ID NO: 125, 123, 116, 43 and 40), and the presence of the sfa gene, are indicated. For region 3, 7 (novel) fragments (SEQ ID NO: 122, 130, 141, 25, 48, 51 and 57) are indicated. For region 4, three (novel) fragments (SEQ ID NO: 121, 44 and 45) are indicated. For region 5, 5 (novel) fragments (SEQ ID NO: 113, 119, 120, 23 and 52) are indicated. For region 6a, eight novel fragments (SEQ ID NO: 127, 133, 27, 34, 36, 42, 46 and 54), and the presence of the known ibe10 product, are indicated. For region 6b, four (novel) fragments (SEQ ID NO: 55, 38, 128 and 151), and the presence of four known products (SEQ ID NO: 212, 226, 201 and 229), are indicated.

[0282] The provision of the sequences allows those skilled in the art to obtain the complete sequence of the corresponding region, according to conventional techniques, and to identify, in these regions, the presence of possible open reading frames (ORFs).

[0283] One of the conventional techniques consists in developing primers for amplifying the desired region, based on the sequences of the fragments of this region, and in carrying out a PCR amplification using various combinations of said primers placed in contact with the polynucleotide population of an E. coli strain of group B2 or D (which may or not be ECOR), under conventional PCR conditions. The PCR products which overlap are sequenced on both strands, using the chain termination technique and automated sequencing.

[0284] If necessary, the sequence obtained can be extended beyond the limit of the clones available by cloning, for example in lambda DASH-II, partial fragments of approximately 15 kb obtained by restriction carried out on said polynucleotide population. The inserts overlapping the desired region are then identified by hybridization with clones of this region. The inserted DNA is then sequenced from the end of the inserts, and these sequences are used to develop novel primers which will be used to directly amplify the chromosomal (and non-phage) DNA. Amplification of the chromosomal DNA is then obtained using these novel primers and those of the shorter sequence already obtained. These PCR strands are also sequenced on both strands, which then produces the complete sequence of the desired region.

[0285] Alternatively, the sequence of such regions can be obtained by extension of the sequencing of the chromosome of an E. coli strain of group B2 or D, from points at which a clone which is of nature B2/D+ A− is located (cf. Example 6 below).

[0286] The open reading frames of the sequences obtained for the regions can then be analysed according to conventional techniques for seeking ORFs. A search is carried out in particular for ORFs which begin with ATG or CTG and which have a high codon use index.

### EXAMPLE 5

[0287] Method and Kit for Identifying the Phylogenic Group of an E. coli Strain

[0288] As indicated in Examples 1, 2 and 3, the polynucleotides which are of nature B2/D+ A− can be used to determine the phylogenic group of any E. coli strain. They can be used alone, in combination together or in combination with other products, depending on the result and the precision of phylogeny desired. In the event of positive detection, the set of DNAs which are of nature B2/D+ A− makes it possible to eliminate the hypothesis that a strain belongs to the group A. More finely, the presence or absence of the chuA gene, or of the fragments which are of nature B2/D+ A− (in particular SEQ ID NO: 241, 195, 185 and 248), each make it possible to completely distinguish between group A or B1, on the one hand, and group B2 or D, on the other hand. The presence or absence of the TspE4.C2 fragment (SEQ ID NO: 119), of the gene which corresponds to it or of the other fragments, of this gene, which are of nature B2/D+ A− make it possible to completely distinguish between group A and group Bl. The presence or absence of the SauE15.I12 fragment (SEQ ID NO: 37), of the gene which corresponds to it or of the other fragments, of this gene, which are of nature B2/D+ A− make it possible to completely distinguish between group B2 or D and group A. The detection of such presences or absences can take place by any means available to those skilled in the art. It can in particular be carried out using said polynucleotides as probes (Southern technique), or by constructing amplification primers capable of amplifying one of said polynucleotides, so as to carry out a PCR. The construction of probes and of primers can be carried out according to any technique known to those skilled in the art; examples of such constructions are given below. When these polynucleotides are coding polynucleotides, the detection of the corresponding polypeptides (using antibodies directed against these polypeptides) constitutes a variant of implementation.

[0289] Using the teaching given in the present application, those skilled in the art can design the decision tree which corresponds to the level of phylogenic precision desired.

[0290] More particularly described here, is an example of a phylogenic identification method which allows a phylogenic precision of at least 99% for E. coli. This method is based on the PCR detection of two genes (chuA and yjaA), the sequence of which is known, but which are of novel nature, and on the detection of the TspE4.C2 novel DNA fragment (SEQ ID NO: 119). The method was evaluated by testing 220 strains which had already been grouped together using reference methods (multilocus enzymatic electrophoresis, MLEE and/or ribotyping). The inventors in fact demonstrated that the known chuA gene is present in 100% of the ECOR strains of group D, in 100% of the ECOR strains of group B2, and in 0% of the ECOR strains of group A and of the ECOR strains of group B1. They also demonstrated that the yjaA gene, the sequence of which is known, is present in 100% of the ECOR B2 strains and in 0% of the ECOR strains of group D. The yjaA gene was, until then, only known to be present in the E. coli strain K12 (group A), but had no known function. It was also demonstrated that the TspE4.C2 novel fragment is present in approximately 94% of the ECOR strains of group B1 and in 0% of the ECOR strains of group A. The combination of these three phylogenic markers makes it possible to access a level of effectiveness of distinction between the groups A, B1, B2, B2 and D, which is greater than 99%. A technical procedure for implementing this combination is also described, which is technically very advantageous: triplex PCR. This novel method is rapid and simple, it can be used directly on a bacterial colony, and it does not require having a reference collection, unlike the techniques of the prior art, and MLEE and ribotyping in particular. The method described therefore represents the first method which may constitute a real clinical tool for routine analyses.

[0291] Materials and Methods

[0292] Bacterial strains. The 72 strains of the ECOR collection are available from the ATCC. These reference strains, isolated from various hosts and various geographical locations, are representative of the range of genotypic variation of the species. Sixty-eight of these strains belong to the four main phylogenic groups (A, B1, B2 and D), and 4 are unclassified.

[0293] A set of 86 E. coli strains having caused neonatal meningitis (NMEC), 34 E. coli strains responsible for neonatal septicaemia without meningitis, 30 E. coli strains isolated from healthy newborns, and the uropathogenic E. coli strain J96 (Q4:K6) were also tested. The distribution by phylogenic group of 69 of the 86 NMEC strains has already been described (Binger et al. 1998, J. Infect. Dis. 177:642-650). The other 17 NMEC and the remaining 65 clinical isolates were classified by means of ribotyping as previously described in Binger et al. (ref. above). The laboratory E. coli K-12 strain MG1655, which belongs to the phylogenic group A, was also used.

[0294] The bacteria were cultured at 37° C. on Luria Bertani broth medium or agar. If necessary, ampicillin (100 μg per ml) was used.

[0295] PCR amplification. In a first step, the PCR was carried out according to a standard protocol. The reaction was carried out in a volume of 20 μl containing 2 μl of 10×buffer (supplied with Taq polymerase), 20 pmol of each primer, 2 μM of each dNTP, 2.5 U of Taq polymerase (ATGC Biotechnologie, Noisy-le-Grand, France) and 200 ng of genomic DNA. The PCR was carried out using a Perkin-Elmer GeneAmp 9600 thermal cycling machine, with MicroAm tubes, under the following conditions: denaturation for 5 minutes at 94° C., 30 cycles of 30 seconds at 94° C., 30 seconds at 55° C. and 30 seconds at 72° C., and a final extension step of 7 minutes at 72° C., using the pairs of primers:

| | |
|---|---|
| chuA.1 | |
| (5′-GACGAACCAACGGTCAGGAT-3′; and | SEQ ID NO: 160) |
| chuA.2 | |
| (5′-TGCCGCCAGTACCAAAGACA-3′;, | SEQ ID NO: 161) |
| for chuA | |
| yjaA.1 | |
| (5′-TGAAGTGTCAGGAGACGCTG-3′; and | SEQ ID NO: 162) |
| yjaA.2 | |
| (5′-ATGGAGAATGCGTTCCTCAAC-3′;, | SEQ ID NO: 163) |
| for yjaA and | |
| TspE4C2.1 | |
| (5′-GAGTAATGTCGGGGCATTCA-3′; and | SEQ ID NO: 164) |
| TspE4C2.2 | |
| (5′-CGCGCCAACAAAGTATTACG-3′; | SEQ ID NO: 165) |
| for TspE4C2. | (SEQ ID NO: 119) |

[0296] These pairs of primers generate, by amplification, fragments of 279 bp, of 211 bp and of 152 bp, respectively.

[0297] According to a simplified protocol, a two-step triplex polymerase reaction was used. The components of the reaction are the same as in the standard protocol, except

[0298] (i) the DNA was provided directly by 3 μl of bacterial lysate or a colony fraction,

[0299] (ii) the six primers mentioned above were mixed together,

[0300] (iii) the PCR steps were as follows: denaturation for 4 minutes at 94° C., 30 cycles of 5 seconds at 94° C. and 10 seconds at 59° C., and a final extension step of 5 minutes at 72° C.

[0301] Southern transfer. The Southern transfer was carried out by transfer by capillarity onto positively charged nylon membranes. The hybridization was carried out at 65° C. in 1% SDS/1M NaCl/50 mM Tris HCl, pH 7.5/1% of blocking agent (Boehringer Mannheim, Mannheim, Germany). The membranes were washed in 2×SSC for 15 minutes at room temperature; then in 2×SSC/0.1% SDS for 30 minutes at 65° C. and finally, in 0.1×SSC for 5 minutes at room temperature. The detection of chemiluminescence was carried out according to the manufacturer's instructions (DIG Luminescence Detection Kit for nucleic acids, Boehringer Mannheim). The probes were produced by PCR according to the manufacturer's instructions (PCR DIG Probe Synthesis Kit, Boehringer Mannheim) and using the primers and the amplification procedure described above for the standard protocol.

[0302] Results

[0303] Two hundred and twenty strains were analysed. Their phylogenic groups determined by reference methods are as follows: 43 strains belong to group A, 23 to group B1, 41 to group D and 113 to group B2.

TABLE 6
PCR amplification of genes chuA et yjuA and of TSPE4.C2 DNA
fragment in E. coli strains of various
collections, depending on their phylogenic group.

| | | Groups according | Number of strains | | |
|---|---|---|---|---|---|
| Strains or isolates | | to RM (number of | having a positive amplification | | |
| collection | Method | strains) | chuA | yjuA | TSPE4.C2 |
| ECOR | MLEE | A(25) | 0 | 18(72%) | 0 |
| (n = 68) | | B1(16) | 0 | 1(6%) | 15(94%) |
| | | D(12) | 12(100%) | 0 | 2(17%) |
| | | B2(15) | 15(100%) | 15(100%) | 12(80%) |
| Neonatal meningitis | Ribotyping | A(5) | 0 | 5(100%) | 0 |
| ((n = 86) | | B1(3) | 0 | 1(33%) | 2(66%) |
| | | D(18) | 18(100%) | 0 | 2(11%) |
| | | B2(60) | 60(100%) | 60(100%) | 59(98%) |
| Other clinical | Method of the | A(12) | 0 | 9(75%) | 0 |
| strains (n = 64) | invention | B1(4) | 0 | 0 | 4(100%) |
| | | D(11) | 11(100%) | 0 | 1(9%) |
| | | B2(37) | 37(100%) | 37(100%) | 34(92%) |
| E. coli K12 | MLEE | A(1) | 0 | 1 | 0 |
| E. coli J96 | Ribotyping | B2(1) | 1 | 1 | 0 |
| | (this study) | | | | |
| Other clinical | | A(43) | 0 | 33(77%) | 0 |
| strains (n = 220) | | B1(23) | 0 | 2(9%) | 21(91%) |
| | | D(41) | 41(100%) | 0 | 5(12%) |
| | | B2(113) | 113(100%) | 113(100%) | 105(93%) |

R.M: phylogenic groups assessed by reference methods (MLEE or ribotyping)
MLEE: multilocus enzymatic electrophoresis Herzer et al. 1990, J. Bacteriol. 172: 6175-6178
Ribotyping: Binzen et al. 1998, J. Infect. Dis. 177: 642-650

[0304] Table 6 above shows the results obtained with the method according to the invention and the reference methods for the complete set of strains, according to phylogenic group. The chuA gene is present in all the strains belonging to groups B2 and D, and absent from all the strains of groups A and B1. This makes it possible to effectively separate groups B2/D from groups A/B1. In the same way, the yjaA gene allows complete distinction between group B2 (100% positive strains) and group D (100% negative strains). Finally, the novel TspE4.C2 clone is present in all the strains of group B1 except 2, and absent from all the strains of group A. All the PCR results were confirmed by Southern hybridization. The results of these three amplifications made it possible to establish a dichotomous decision tree for the phylogenic grouping. This decision tree is in particular illustrated in FIG. 3. Following this tree, 218 of the 220 strains tested (99%) are correctly grouped with respect to the reference methods, while only two strains which are considered to belong to group B1 according to the reference methods are identified as being from group A with the technique according to the invention. Identical results were obtained with the standard and simplified PCR protocols. FIG. 4 illustrates the various profiles which were obtained by triplex PCR for the four phylogenic groups. These novel profiles therefore constitute analytical references for the phylogenic grouping of E. coli.

[0305] Discussion

[0306] The inventors have developed a PCR method for rapidly determining the phylogenic group of E. coli strains. Using two genes, chuA and yjaA, and a novel DNA fragment named TspE4.C2 (SEQ ID NO: 119, cf. Example 1), the phylogenic groups of 220 strains which had previously been assigned to phylogenic groups determined using known methods were determined. The precision of analysis obtained according to the invention exceeds 99% with respect to the grouping established with the methods of the prior art. In addition, the same results were observed with a technically very simple triplex PCR method which is used directly on the bacterial colonies.

[0307] The phylogenic characterization of the E. coli strains, based on a few genotypic or phenotypic characteristics, appeared, in the prior art, to be very difficult. Such genotypic characteristics (presence or absence of a gene, for example) must satisfy various criteria in order to be able to be used for phylogenic characterization. First of all, the gene must have been acquired, or have been deleted, when the group that it characterizes emerged. Secondly, this same gene must have been “stabilized” so as to exclude any phenomenon of subsequent deletion or horizontal transfer towards bacteria belonging to other phylogenic groups. Finally, recombination phenomena must be very rare in the candidate gene. In other words, the gene product must not be a target for natural selection, which would favour novel genetic recombinations. In the prior art, the attempts to identify characteristics of phylogenic groups based on the phenotype or on the genotype have not been shown to be sufficiently discriminating. For the first time, described herein, is the combined use of two genes and of a novel DNA fragment which make it possible, in a technically very simple way, to determine the phylogenic group with good effectiveness.

[0308] However, two strains (ECOR 70 and an NMEC) belonging, according to conventional techniques, to the phylogenic group B1 were classified, by the method according to the invention, in group A. This analytical difference may be explained by the fact that there may exist an intermediate genetic base common to these two groups of strains, and by the fact that the regions studied using the method according to the invention (chuA, yjaA and TspE4.C2, are located at 78.7 minutes, 90.8 minutes and approximately at 87 minutes, respectively, on the genome of E. coli K12) might be closer to the group A than the regions studied using the methods of the prior art. Specifically, it has been demonstrated that the groups A and B1 are sister groups. In addition, recent analyses of multiple chromosomal nucleotide sequences show that ECOR 70 can be considered to be a “hybrid” strain in which a few housekeeping genes have nucleotide sequences which are common with ECOR strains of group A, and in which few other genes have nucleotide sequences which are common with the ECOR strains of group B1. The phylogenic membership of ECOR 70 to group B1 is not clearly determined; it is, in any event, considered to be part of group A using the method according to the invention.

[0309] In addition to the rapidity of our novel PCR method, the invention has the advantage of not requiring the use of a reference collection such as the ECOR strain or another collection, which means that the analysis can be easily carried out in the laboratory and in particular for routine analyses. In addition, unlike the other methods, the allocation to the phylogenic groups is unequivocal. Specifically, the 4 strains which, until now, were unclassified in the ECOR collection (E31, E37, E42 and E43) can be classified using the method of the invention; the first three strains belong to group D, and the fourth to group A. It can also be noted that all the sequences of the housekeeping genes studied in the latter strain appear to be characteristic of those found in the strains of group A.

[0310] In conclusion, this simple and rapid phylogenic grouping technique has many practical uses. The first use is, of course, the bioclinical use, taking into account the link which can be established between the phylogenic group and the possible virulence or dangerousness. The second use corresponds to a biotechnological screening tool which makes it possible to eliminate potentially pathogenic strains, i.e. strains which are highly dangerous, when candidate strains are being sought for cloning. It was possible to develop such screening tools in the prior art, for example for identifying the E. coli K12 strains by PCR or for detecting E. coli strains which exhibit none of the virulence genes which were, until then, known due to a reverse dot blot procedure. The method described herein has the notable advantage of allowing the identification of nonpathogenic strains other than E. coli K12, and of being suitable for screening strains on a large scale.

### EXAMPLE 6

[0311] Production of Seventy CFT073+ K12− Zones and Thirty One RS218+/K12− Zones

[0312] In the previous examples, the production of a library of clones, which are of nature B2/D+ A−, by substrative hybridization between the E. coli strain C5 (E. coli strain belonging to group B2) and E. coli strains of group A (nonpathogenic E. coli strains ECOR4 and ECOR15), is described. The sequence of these clones is given in FIG. 2 (SEQ ID NO: 1-153 and 169-253).

[0313] These clones are present with greater frequency in the ECOR E. coli of group B2 and/or in the ECOR E. coli of group D with respect to the ECOR E. coli of group A (preferably 2 times greater, more preferably 3 times greater, even more preferably 3.5 times greater, and very preferably 4 times greater). They are, in particular, present at a frequency greater than 10% in the ECOR E. coli of group B2 and/or in the ECOR E. coli of group D, and at a frequency of less than 25%, preferably less than 20%, more preferably less than 10%, and even more preferably less than 5% in the ECOR E. coli of group A, the frequency observed in the ECOR E. coli of group A always remaining less than that observed in the ECOR E. coli of group B2 and/or in the ECOR E. coli of group D.

[0314] The presence of these clones could, moreover, be verified in various E. coli strains of group B2 or D which are involved in pathologies which are entirely different from that in which the E. coli strain C5, which was initially used for isolating these clones, participates. The presence of these clones was, for example, verified in E. coli CFT073 (E. coli of group B2 involved in adult pyelonephritis).

[0315] In doing so, it was observed that some of these clones lie, at the level of the chromosome of E. coli CFT073, within polynucleotide zones which are not found in E. coli K12 MG1655. CFT073+ K12− zones were thus isolated in the vicinity of said fragments which are of nature B2/C+ A− (isolated from E. coli C5; cf. Example 1). An illustration is given herein for seventy of them.

[0316] The chromosomal position of each of these seventy CFT073+ K12− zones was then determined (“K12 coordinates” column in Table 8 below) with respect to the chromosomal map of E. coli K12, which constitutes a reference in the field. These seventy CFT073+ K12− zones were then analysed in order to determine the possible presence of open reading frames (orf/ORF) using programs such as CodonUse™ (E. coli codon use) and ORF Finder (www.ncbi.nlm.nih.gov/gorf/gorf.html, bacterial genetic code). The corresponding protein sequences (ORFs) were extracted compared to various databases in order to search for homology compared to known sequences. The sequences of these 70 zones, and of their ORFs, are represented in FIG. 6. For each zone, the protein sequence (ORF) and polynucleotide sequence (orf) of the open reading frame identified is shown, indicating the start and end positions (Pos.) of these frames with respect to the complete sequence of the zone concerned. Some of these ORFs are encoded by orfs which are, in fact, located on the strand complementary to the indicated sequence of the region (the “frame start” position then has a number which is higher than that of the “frame end” position).

[0317] The same protocol was applied to RS218 E. coli clones. RS218+/K12− zones have also been isolated in the neiboughring of the fragments with a B2/D+ A− nature.

[0318] Table 7 below summarizes the SEQ ID NOS assigned to each of the seventy CFT073+ K12− zones and to their ORFs and orfs, and each thirty one RS218+/K12− zones.

TABLE 7

| Zone | SEQ ID NO | Reading frames |
|---|---|---|
| number | of the Zone | (SEQ ID No of the ORF; SEQ ID NO of the Orf |
| 1 | 256 | (258; 257) (260; 259) |
| 2 | 261 | (263; 262) (265; 264) (267; 266) |
| | | (269; 268) (271; 270) (272; 273) |
| 3 | 274 | (276; 275) (278; 277) (280; 279) (282; 281) |
| 4 | 283 | (285; 284) (287; 286) |
| 5 | 288 | (290; 289) (292; 291) |
| | | (294; 293) (296; 295) |
| 6 | 297 | (299; 298) (301; 300) (303; 302) |
| | | (305; 304) (307; 306) (309; 308) (311; 310) |
| 7 | 312 | (314; 313) |
| 8 | 315 | (317; 316) (319; 318) |
| | | (321; 320) (323; 322) (325; 324) |
| 9 | 326 | (328; 327) (329; 330) (332; 331) |
| | | (334; 333) (336; 335) (338; 337) |
| | | (340; 339) (342; 341) |
| 10 | 343 | (345; 344) |
| 11 | 346 | (348; 347) (350; 349) (352; 351) |
| 12 | 353 | (355; 354) (357; 356) (359; 358) (361; 360) |
| 13 | 362 | (364; 363) (366; 365) (368; 367) (370; 369) |
| | | (372; 371) (374; 373) (376; 375) (378; 377) |
| 14 | 379 | (381; 380) (383; 382) (385; 384) |
| | | (387; 386) (389; 388) (391; 390) |
| | | (393; 392) (395; 394) (397; 396) (399; 398) |
| 15 | 400 | (402; 401) |
| 16 | 403 | (405; 404) (407; 406) |
| 17 | 408 | (410; 409) (412; 411) (414; 413) (416; 415) |
| 18 | 417 | (419; 418) |
| 19 | 420 | (426; 425) (428; 427) (430; 429) |
| 20 | 431 | (433; 432) (435; 434) (437; 436) |
| | | (439; 438) (441; 440) (443; 442) |
| 21 | 444 | (446; 445) (448; 447) |
| 22 | 449 | (451; 450) (453; 452) (455; 454) |
| 23 | 456 | (458; 457) (460; 459) |
| 24 | 461 | (463; 462) (465; 464) (467; 466) (469; 468) |
| | | (471; 470) (473; 472) (475; 474) |
| 25 | 476 | (478; 477) (480; 479) (482; 481) |
| | | (484; 483) (486; 485) |
| 26 | 487 | (489; 488) |
| 27 | 490 | (492; 491) (494; 493) (496; 495) (498; 497) |
| | | (500; 499) (502; 501) (504; 503) (506; 505) |
| 28 | 507 | (509; 508) (511; 510) (513; 512) |
| | | (515; 514) (517; 516) (519; 518) |
| | | (521; 520) (523; 522) (525; 524) |
| | | (527; 526) (529; 528) (531; 530) (533; 532) |
| 29 | 534 | (536; 535) (538; 537) (540; 539) |
| | | (542; 541) (544; 543) (546; 545) |
| 30 | 547 | (549; 548) (551; 550) (553; 552) |
| 31 | 554 | (556; 555) (558; 557) (560; 559) (562; 561) |
| | | (564; 563) (566; 565) (568; 567) |
| 32 | 569 | (571; 570) (573; 572) (575; 574) (577; 576) |
| 33 | 578 | (580; 579) (582; 581) |
| 34 | 583 | (585; 584) (587; 586) (589; 588) |
| 35 | 590 | (592; 591) (594; 593) (596; 595) |
| 36 | 597 | (599; 598) (601; 600) (603; 602) |
| | | (605; 604) (607; 606) (609; 608) |
| 37 | 610 | (612; 611) (614; 613) (616; 615) (618; 617) |
| | | (620; 619) (622; 621) (624; 623) (626; 625) |
| | | (628; 627) (630; 629) (632; 631) (634; 633) |
| 38 | 635 | (637; 636) (639; 638) (641; 640) |
| | | (643; 642) (645; 644) (647; 646) |
| 39 | 648 | (650; 649) (652; 651) |
| 40 | 653 | (655; 654) (657; 656) (659; 658) (661; 660) |
| 41 | 662 | (664; 663) |
| 42 | 665 | (667; 666) (669; 668) (671; 670) |
| | | (673; 672) (675; 674) |
| 43 | 676 | (678; 677) (680; 679) (682; 681) |
| | | (684; 683) (686; 685) |
| 44 | 687 | (689; 688) (691; 690) (693; 692) |
| | | (695; 694) (697; 696) (699; 698) |
| 45 | 700 | (702; 701) (704; 703) |
| 46 | 705 | (707; 706) (709; 708) (711; 710) |
| | | (713; 712) (715; 714) |
| 47 | 716 | (718; 717) |
| 48 | 719 | (721; 720) (723; 722) (725; 724) (727; 726) |
| 49 | 728 | (730; 729) (732; 731) (734; 733) |
| | | (736; 735) (738; 737) (740-739) |
| | | (742; 741) (744; 743) |
| 50 | 745 | (747; 746) (749; 748) |
| 51 | 750 | (752; 751) (754; 753) (756; 755) |
| | | (758; 757) (760; 759) (762; 761) |
| | | (764; 763) |
| 52 | 765 | (767; 766) (769; 768) (771; 770) |
| | | (773; 772) |
| 53 | 774 | (776; 775) (778; 777) (780; 779) |
| | | (782; 781) (784; 783) (786; 785) |
| | | (788; 787) (790; 789) (792; 791) |
| | | (794; 793) (796; 795) (798; 797) |
| | | (800; 799) (802; 801) (804; 803) |
| | | (806; 805) (808; 807) (810; 809) |
| | | (812; 811) (814; 813) |
| 54 | 815 | (817; 816) (819; 818) (821; 820) |
| 55 | 822 | (824; 823) (826; 825) (828; 827) |
| 56 | 829 | (831; 830) (833; 832) (835; 834) (837; 836) |
| | | (839; 838) (841; 840) (843; 842) (845; 844) |
| | | (847; 846) (849; 848) (851; 850) (853; 852) |
| | | (855; 854) (857; 856) (859; 858) (861; 860) |
| | | (863; 862) (865; 864) (867; 866) (869; 868) |
| | | (871; 870) (873; 872) (875; 874) (877; 876) |
| | | (879; 878) (881; 880) (883; 882) (885; 884) |
| | | (887; 886) (889; 888) (891; 890) (893; 892) |
| | | (895; 894) (897; 896) (899; 898) (901; 900) |
| | | (903; 902) (905; 904) (907; 906) (909; 908) |
| | | (911; 910) (913; 912) (915; 914) (917; 916) |
| | | (917.1; 916.1) |
| 57 | 920 | |
| 58 | 921 | (923; 922) (925; 924) (927; 926) (929; 928) |
| | | (931; 930) (933; 932) (935; 934) (937; 936) |
| | | (939; 938) (941; 940) (943; 942) (945; 944) |
| | | (947; 946) (949; 948) (951; 950) (953; 952) |
| | | (955; 954) (957; 956) (959; 958) (961; 960) |
| | | (963; 962) (965; 664) (967; 966) (969; 968) |
| | | (971; 970) |
| 59 | 972 | (974; 973) (976; 975) (978; 977) (980; 979) |
| | | (982; 981) (984; 983) (986; 985) (988; 987) |
| | | (990; 989) (992; 991) |
| 60 | 993 | (995; 994) (997; 996) (999; 998) |
| | | (1001; 1000) (1003; 1002) (1005; 1004) |
| | | (1007; 1006) (1009; 1008) (1011; 1010) |
| | | (1013; 1012) (1015; 1014) (1017; 1016) |
| | | (1019; 1018) (1021; 1020) (1023; 1022) |
| | | (1025; 1024) (1027; 1026) (1029; 1028) |
| | | (1031; 1030) (1033; 1032) (1035; 1034) |
| | | (1037; 1036) |
| 61 | 1038 | (1040; 1039) (1042; 1041) (1044; 1043) |
| | | (1046; 1045) (1048; 1047) |
| 62 | 1049 | (1051; 1050) (1053; 1052) (1055; 1054) |
| | | (1057; 1056) (1059; 1058) (1061; 1060) |
| | | (1063; 1062) (1065; 1064) (1067; 1066) |
| | | (1069; 1068) (1071; 1070) (1073; 1072) |
| | | (1075; 1074) (1077; 1076) |
| 63 | 1078 | (1080; 1079) (1082; 1081) |
| 64 | 1083 | (1085; 1084) (1087; 1086) (1089; 1088) |
| | | (1091; 1090) (1093; 1092) (1095; 1094) |
| 65 | 1096 | (1098; 1097) (1100; 1099) (1102; 1101) |
| | | (1104; 1103) (1106; 1105) (1108; 1007) |
| | | (1110; 1109) (1112; 1111) (1114; 1113) |
| | | (1116; 1115) |
| 66 | 1117 | (1119; 1118) (1121; 1120) (1123; 1122) |
| | | (1125; 1124) (1127; 1126) (1129; 1128) |
| | | (1131; 1130) (1133; 1132) (1135; 1134) |
| | | (1137; 1136) (1139; 1138) (1141; 1140) |
| | | (1143; 1142) (1145; 1144) (1147; 1146) |
| | | (1149; 1148) (1151; 1150) (1153; 1152) |
| | | (1155; 1154) (1157; 1156) (1159; 1158) |
| | | (1161; 1160) (1163; 1162) (1165; 1164) |
| | | (1167; 1166) (1169; 1168) (1171; 1170) |
| | | (1173; 1172) (1175; 1174) (1177; 1176) |
| | | (1179; 1178) (1181; 1180) (1183; 1182) |
| | | (1185; 1184) |
| 67 | 1186 | (1188; 1187) (1190; 1189) |
| 68 | 1191 | (1193; 1192) (1195; 1194) (1197; 1196) |
| | | (1199; 1198) (1201; 1200) (1203; 1202) |
| | | (1205; 1204) (1207; 1206) (1209; 1208) |
| | | (1211; 1210) (1213; 1212) (1215; 1214) |
| | | (1215.1; 1214.1) (1215.2; 1214.2) |
| 69 | 1216 | (1218; 1217) (1220; 1219) (1222; 1221) |
| | | (1224; 1223) (1226; 1225) (1228; 1227) |
| | | (1230; 1229) (1232; 1231) (1234; 1233) |
| | | (1236; 1235) (1238; 1237) (1240; 1239) |
| | | (1242; 1241) (1244; 1243) (1244.1; 1243.1) |
| 70 | 1245 | (1247; 1246) (1249; 1248) |
| 71 | 1250 | (1252; 1251) (1254; 1253) (1256; 1255) |
| | | (1258; 1257) (1260; 1259) (1262; 1261) |
| | | (1264; 1263) (1266; 1265) (1268; 1267) |
| | | (1270; 1269) (1272; 1271) |
| 72 | 1273 | (1275; 1274) (1277; 1276) (1279; 1278) |
| 73 | 1280 | (1282; 1281) (1284; 1283) (1286; 1285) |
| | | (1288; 1287) |
| 74 | 1289 | (1291; 1290) (1293; 1292) (1295; 1294) |
| 75 | 1296 | (1298; 1297) |
| 76 | 1299 | (1301; 1300) (1303; 1302) |
| 77 | 1304 | (1306; 1305) |
| 78 | 1307 | (1309; 1308) (1311; 1310) (1313; 1312) |
| | | (1315; 1314) (1317; 1316) |
| 79 | 1318 | (1320; 1319) (1322; 1321) (1324; 1323) |
| | | (1326; 1325) (1328; 1327) (1330; 1329) |
| 80 | 1331 | (1333; 1332) (1335; 1334) (1337; 1336) |
| | | (1339; 1338) (1341; 1340) (1343; 1342) |
| | | (1345; 1344) (1347; 1346) (1349; 1348) |
| | | (1351; 1350) (1353; 1352) |
| 81 | 1354 | (1356; 1355) |
| 82 | 1357 | |
| 83 | 1358 | (1360; 1359) (1362; 1361) (1364; 1363) |
| | | (1366; 1365) (1368; 1367) (1370; 1369) |
| | | (1372; 1371) |
| 84 | 1373 | (1375; 1374) (1377; 1376) (1379; 1378) |
| | | (1381; 1380) (1383; 1382) |
| 85 | 1386 | (1388; 1387) (1390; 1389) (1392; 1391) |
| | | (1394; 1393) (1396; 1395) (1398; 1397) |
| 86 | 1399 | (1401; 1400) (1403; 1402) (1405; 1404) |
| | | (1407; 1406) (1409; 1408) |
| 87 | 1410 | (1412; 1411) (1414; 1413) (1416; 1415) |
| | | (1418; 1417) (1420; 1419) (1422; 1421) |
| | | (1424; 1423) |
| 88 | 1425 | (1427; 1426) (1429; 1428) (1431; 1430) |
| | | (1433; 1432) (1435; 1434) (1437; 1436) |
| | | (1439; 1438) (1441; 1440) (1443; 1442) |
| | | (1445; 1444) (1447; 1446) (1449; 1448) |
| | | (1451; 1450) (1453; 1452) |
| 89 | 1454 | (1456; 1455) (1458; 1457) (1460; 1459) |
| | | (1162; 1461) (1464; 1463) (1466; 1465) |
| 90 | 1467 | (1469; 1468) |
| 91 | 1470 | (1472; 1471) (1474; 1473) |
| 92 | 1475 | (1477; 1476) (1479; 1478) (1481; 1480) |
| 93 | 1482 | (1484; 1483) (1486; 1485) (1488; 1487) |
| | | (1490; 1489) (1492; 1491) (1494; 1493) |
| | | (1496; 1495) |
| 94 | 1497 | (1499; 1498) (1501; 1500) (1503; 1502) |
| 95 | 1504 | (1506; 1505) (1508; 1507) (1510; 1509) |
| | | (1512; 1511) (1514; 1513) (1516; 1515) |
| 96 | 1517 | (1519; 1518) (1521; 1520) (1523; 1522) |
| 97 | 1524 | |
| 98 | 1525 | (1527; 1526) (1529; 1528) (1531; 1530) |
| | | (1533; 1532) |
| 99 | 1534 | (1536; 1535) (1538; 1537) (1540; 1539) |
| 100 | 1541 | (1543; 1542) (1545; 1544) (1547; 1546) |
| | | (1549; 1548) (1551; 1550) (1553; 1552) |
| | | (1555; 1554) (1557; 1556) (1559; 1558) |
| | | (1561; 1560) |
| 101 | 1562 | (1564; 1563) (1566; 1565) (1568; 1567) |

[0319] Tables 8 and 9 below summarizes the results obtained on SEQ IDs; the following are indicated:

[0320] Table 8:—the SEQ ID NOs and the names of the clones having allowed the identification of each CFT073+ K12− zone and RS218+/K12− zone, the number which was assigned to this zone, the coordinates of each zone with respect to the chromosomal map of E. coli K12, the respective size of each zone, the number of the fragment, the number of the region within which the said zone is located (regions 1, 2, 3, 4, 5, 6a or 6b as identified in Examples 1 and 3 above; or, if the zone is not within a region, indicated in this column is the name of the E. coli RS218 fragment at the level of which this zone is located, cf. FIG. 1 for the E. coli RS218 fragment names),

[0321] Table 9:—the homology with E. coli RS218, E. coli 0157:H7, E. coli CFT073.

TABLE 8

| | | Coordinate on the | | | position of | SEQ ID NO | Overlap | |
|---|---|---|---|---|---|---|---|---|
| | | E.coli K12 | | | the clone | of the (ORF, orf) | with an | Overlap |
| | clone(s) on | chromosome | Size of the | | on the | encompassing | intergenic | between |
| fragment | fragment | of the fragment | fragment | Region | fragment | the clone | sequence | two orfs |
| 1 | SauE15.C12 | 3170205-3170387 | 1312 | | | | | |
| 2 | SauE15.C12 | 3171462-3171524 | 7316 | | 5993-6148 | (263; 262) | | |
| 3 | SauE15.M11 | 2163577-2163599 | 5203 | | 1800-1966 | (278; 277) | | |
| 4 | SauE4.H6 | 4264441-4264615 | 1584 | | 1343-1585 | (285; 284) | + | |
| 5 | TspE4.C2 | 4076018-4076534 | 2444 | 5 | 743-945 | (290; 289) | | |
| 5 | TspE15.G3 | 4076018-4076534 | 2444 | | 2094-2419 | (296; 295) | + | |
| 6 | TspE4.C3 | 4061139-4073066 | 8644 | 5 | 5376-5559 | (307; 306) | | |
| 7 | TspE4.H3 | 4085618-4090704 | 1835 | | 154-333 | — | | |
| 8 | SauE15.F12 | 4129846-4130052 | 7648 | 5 | 1514-1737 | (319; 318) | | |
| 8 | TspE15.A10 | 4129846-4130052 | 7648 | | 1623-1874 | (319; 318) | | |
| 8 | SauE4.G9 | 4129846-4130052 | 7648 | | 6596-6775 | (325; 324) | | |
| 8 | SauE4.F9 | 4129846-4130052 | 7648 | | 4029-4467 | (321; 320) | + | |
| 8 | TspE4.A7 | 4129846-4130052 | 7648 | 5 | 1377-1618 | (319; 318) | | |
| 9 | TspE15.H3 | 705240-705186 | 9137 | | 4170-4432 | (334; 333) | | |
| 10 | SauE15.A5 | 1388748-1388748 | 665 | | 379-570 | (345; 344) | + | |
| 11 | SauE15.E9 | 17126-17342 | 4144 | | 1203-1316 | (350; 349) | | |
| 11 | SauE15.E12 | 17126-17342 | 4144 | | 1483-1587 | (350; 349) | | |
| 11 | TspE15.E10 | 17126-17342 | 4144 | | 335-574 | (348; 347) | + | |
| 12 | TspE4.E7 | 4590882-4592607 | 5426 | 6a | 2416-2616 | (359; 358) | | |
| 13 | TspE4.K4 | 3404903-3405013 | 8681 | | 8402-8592 | (378; 377) | + | |
| 13 | SauE4.H7 | 3404903-3405013 | 8681 | | 7506-7869 | (376; 375) | + | |
| 14 | SauE4.A11 | 3561151-3561762 | 9973 | | 1741-1801 | (385; 384) | | |
| 14 | TspE15.H9 | 3561151-3561762 | 9973 | | 9109-9381 | (399; 398) | | |
| 15 | SauE15.L11 | 3754245-3754254 | 1370 | a (Notl) | 346-661 | (402; 401) | | |
| 16 | TspE4.D1 | 2753977-1432792 | 1692 | | 1097-1333 | (407; 406) | + | |
| 17 | SauE4.B1 | 1430899-1427392 | 3761 | | 523-676 | (410 ; 409) | | |
| 17 | TspE15.G6 | 1430899-1427392 | 3761 | | 1375-1655 | (414 ; 413) (412 ; 411) | | + |
| 18 | SauE4.B1 | 1427076-1427064 | 726 | | | | | |
| 19 | TspE15.G7 | 2471606-2471605 | 3270 | | 2539-2823 | (430 ; 429) | | |
| 20 | TspE4.K1 | 2473509-2786860 | 4585 | | 1728-1905 | (435; 434) | | |
| 20 | TspE15.E5 | 2473509-2786860 | 4585 | | 1910-2140 | (435; 434) | | |
| 20 | SauE15.A4 | 2473509-2786860 | 4585 | | 4418-4586 | (443; 442) | | |
| 21 | SauE15.L8 | 2798629-2798551 | 1951 | 3 | 1164-1366 | (448; 447) | | |
| 22 | TspE15.G5 | 2903529-2903946 | 2981 | | 2040-2447 | (455; 454) | | |
| 23 | TspE4.E6 | 4225080-4225293 | 1036 | | | | | |
| 24 | TspE4.E6 | 4227811-4227898 | 6318 | | 685-874 | (463; 462) | | |
| 24 | SauE4.H2 | 4227811-4227898 | 6318 | | 2282-2366 | (465; 464) | + | |
| 24 | SauE4.F8 | 4227811-4227898 | 6318 | | 5868-6055 | (475; 474) | | |
| 24 | SauE15.I12 | 4227811-4227898 | 6318 | | 6060-6266 | (475; 474) | + | |
| 25 | SauE4.H6 | 4261810-4261877 | 7325 | | | | | |
| 26 | SauE4.H6 | 4263309-4263352 | 712 | | | | | |
| 27 | SauE4.H6 | 4265884-4266886 | 13757 | | | | | |
| 27 | SauE15.N9 | 4265884-4266886 | 13757 | | 5819-5927 | (496; 495) | | |
| 27 | TspE4.B11 | 4265884-4266886 | 13757 | | 5985-6175 | (496; 495) | | |
| 28 | SauE15.I7 | 2068681-121950 | 12263 | | 2998-3357 | (517; 516)(519; 518) | | + |
| 28 | SauE15.J2 | 2068681-121950 | 12263 | 6b | 5595-6316 | (523; 522) | + | |
| 28 | TspE4.K12 | 2068681-121950 | 12263 | | 6214-6392 | (523; 522) | | |
| 28 | TspE4.D8 | 2068681-121950 | 12263 | 2 | 6673-6819 | (523; 522) | | |
| 28 | TspE15.D9 | 2068681-121950 | 12263 | | 8608-8836 | (527; 526) | | |
| 28 | SauE15.F3 | 2068681-121950 | 12263 | | 9834-10254 | (527; 526) | | |
| 29 | TspE4.K10 | 237013-207669 | 4871 | 6b | 4045-4295 | (546; 545) | | |
| 29 | SauE4.E10 | 237013-207669 | 4871 | | 4149-4346 | (546; 545) | | |
| 29 | SauE15.A6 | 237013-207669 | 4871 | | 2104-2232 | (544; 543) | + | |
| 30 | TspE4.G11 | 764371-770373 | 2777 | f (notl) | 824-1018 | (549; 548) | | |
| 30 | TspE4.A3 | 764371-770373 | 2777 | f (Notl) | 1603-1815 | (553; 552) | | |
| 31 | SauE15.N6 | 262172-302054 | 7655 | 1 | 4969-5163 | (560; 559) | | |
| 31 | SauE15.H11 | 262172-302054 | 7655 | | 4805-4964 | (560; 559) | | |
| 32 | TspE4.F4 | 324698-324697 | 6000 | | 3774-3998 | (575; 574) | | |
| 33 | SauE15.A11 | 1588333-1588774 | 2497 | c (Notl) | | | | |
| 34 | SauE15.I3 | 3179593-3179639 | 3707 | | 1287-1462 | (585; 584) | | |
| 35 | SauE15.D11 | 3183632-3181831 | 4821 | a (Notl) | 3972-4214 | (596; 595) | | |
| 36 | TspE4.K9 | 3829794-3829838 | 7267 | | 7066-7268 | — | | |
| 36 | TspE15.F9 | 3829794-3829838 | 7267 | | 6340-6583 | (609; 608) | | |
| 37 | SauE15.A12 | 4012900-4012961 | 16066 | | 494-667 | — | | |
| 37 | SauE4.G11 | 4012900-4012961 | 16066 | | 672-921 | (634; 633) | | |
| 37 | TspE15.A3 | 4012900-4012961 | 16066 | | 9678-9884 | (622; 621) | + | |
| 37 | SauE15.M10 | 4012900-4012961 | 16066 | 5 | 14902-15198 | (630; 629)(632; 631) | | + |
| 38 | TspE15.D3 | 4014776-4014824 | 5601 | | 643-845 | (637; 636) | | |
| 39 | SauE4.C7 | 4158487-4158562 | 2703 | | 888-1162 | (650; 649) | | |
| 40 | TspE15.E1 | 2633462-2633903 | 12101 | | 3556-4004 | (655; 654) | | |
| 41 | SauE4.B9 | 3077427-3077662 | 1423 | | 459-638 | (664; 663) | | |
| 42 | SauE15.N4 | 3108458-4497174 | 3129 | | | | | |
| 43 | TspE4.D12 | 4294686-4294793 | 5571 | | 4687-4908 | (686; 685) | | |
| 44 | TspE4.B4 | 1093420-3290368 | 8739 | l (Notl) | 2652-2869 | (691; 690) | | |
| 45 | SauE15.E7 | 3290119-3281094 | 3245 | | 1808-1967 | (702; 701) | + | |
| 45 | TspE15.G12 | 3290119-3281094 | 3245 | | 2039-2325 | (704; 703) | | |
| 46 | SauE4.D9 | 4470142-4474549 | 6164 | | 17-286 | (707; 706) | | |
| 46 | TspE4.H1 | 4470142-4474549 | 6164 | | 4930-5212 | (715; 714) | | |
| 47 | SauE15.H2 | 4477050-4478549 | 1478 | | 1104-1204 | (718; 717) | | |
| 62 | TspE4.D3 | 2074323-? | 16244 | 2 | 1463-1536 | (1055; 1054) | + | |
| 62 | TspE15.H11 | 2074323-? | | | 8239-8348 | — | | |
| 62 | SauE4.H10 | 2074323-? | | | 8239-8349 | — | | |
| 62 | SauE15.N1 | 2074323-? | | 6a | 3498-3700 | (1061; 1060) | | |
| 63 | SauE4.E6 | — | | | 229-417 | (1080; 1079) | | |
| 64 | SauE15.H7 | ?-313031 | 6202 | | 5380-5529 | (1095; 1094) | | |
| 65 | TspE15.C3 | 1529850-1531310 | 12133 | | 6264-6334 | (1108; 1107) | | |
| 66 | TspE15.H7 | — | | | 1155-1374 | — | | |
| 66 | TspE4.A10 | — | | | 32724-32935 | (1121; 1120) | | |
| 67 | SauE4.B8 | — | | | 1343-1374 | (1190; 1189) | | |
| 68 | TspE15.H7 | ?-2074324 | | | 1108-1327 | — | | |
| 68 | TspE4.D3 | ?-2074324 | | 2 | 15238-15364 | — | | |
| 69 | SauE15.K5 | — | | 6a | 1043-1267 | — | | |
| 69 | SauE15.L6 | — | | 6a | 757-1038 | (1230; 1229) | + | |
| 69 | SauE4.E5 | — | | | 546-749 | (1230; 1229) | | |
| 69 | TspE4.K2 | — | | | 1540-1744 | (1232; 1231) | + | |
| 70 | SauE15.J11 | — | 1350 | | 741-974 | (1247; 1246)(1249; 1248) | | + |
| 70 | SauE15.K10 | — | 1350 | | 982-1106 | (1249; 1248) | | |
| 71 | SauE4.C10 | — | 11475 pb | | 8272-8511 | (1268; 1267) | + | |
| 71 | SauE15.B10 | — | 11475 pb | | 4117-4356 | (1260; 1259)(1262; 1261) | | + |
| 71 | SauE4.A2 | — | 11475 pb | | 5636-5955 | (1264; 1263) | + | |
| 72 | SauE15.C7 | — | 4576 pb | | 3445-3599 | (1277; 1276) | | |
| 72 | SauE15.M12 | — | 4576 pb | | 1334-1452 | (1275; 1274) | | |
| 72 | TspE4.B9 | — | 4576 pb | | 520-838 | (1275; 1274) | | |
| 72 | SauE15.E4 | — | 4576 pb | | 425-705 | (1275; 1274) | | |
| 73 | SauE15.H3 | — | 1906 pb | 6a | 1696-1898 | (1288; 1287) | + | |
| 74 | SauE15.A9 | — | 2536 pb | Not d | 500-624 | (1291; 1290)(1293; 1292) | | + |
| 75 | TspE4.H5 | — | 894 pb | 1 | 466-773 | (1298; 1297) | | |
| 76 | TspE15.A2 | 2137782-2137508 | 747 pb | | 129-336 | (1301; 1300) | | |
| 77 | TspE15.H10 | — | 886 pb | | 119-413 | (1306; 1305) | | |
| 78 | TspE15.H2 | — | 4892 pb | | 1990-2247 | (1315; 1314) | | |
| 79 | TspE15.I4 | 2099320-? | 6927 pb | | 4446-4688 | (1328; 1327) | | |
| 80 | TspE4.A4 | 4261856-4262018 | 10848 pb | | 9568-9976 | (1353; 1352) | | |
| 80 | SauE15.H8B | 4261856-4262018 | 10848 pb | | 9509-9668 | (1353; 1352) | | |
| 81 | TspE4.I7 | — | 1716 pb | | 1597-1716 | — | | |
| 82 | SauE4.E7 | 1633100-1633288 | 200 pb | | 43-168 | — | | |
| 83 | TspE4.H6 | — | 5873 pb | 3 | 5764-5873 | (1360; 1359) | | |
| 83 | SauE15.M9 | — | 5873 pb | 3 | 5329-5599 | (1360; 1359) | | |
| 83 | TspE15.D1 | — | 5873 pb | | 2330-2714 | (1366; 1365)(1368; 1367) | | + |
| 84 | SauE15.L9 | 3597559-? | 4737 pb | | 3752-3884 | (1383; 1382) | | |
| 84 | SauE15.L4 | 3597559-? | 4737 pb | 4 | 3562-3747 | (1383; 1382) | | |
| 84 | SauE15.K12 | 3597559-? | 4737 pb | 4 | 3337-3532 | (1381; 1380)(1383; 1382) | | + |
| 85 | TspE4.F12 | 4533846-2076361 | 4386 pb | 6a | 2733-2983 | (1390; 1389) | | |
| 85 | SauE4.C12 | 4533846-2076361 | 4386 pb | | 671-1060 | (1392; 1391) | + | |
| 86 | TspE4.G5 | 1529721-1524886 | 5819 pb | 1 | 449-645 | (1407; 1406) | | |
| 86 | TspE4.A12 | 1529721-1524886 | 5819 pb | 1 | 2489-2731 | (1403; 1402) | | |
| 86 | TspE15.F4 | 1529721-1524886 | 5819 pb | | 2081-2416 | (1403; 1402) | | |
| 87 | SauE15.I2 | — | 6066 pb | 1 | 5755-5936 | (1412; 1411) | | |
| 87 | TspE4.A1 | — | 6066 pb | 1 | 482-711 | (1422; 1421) | | |
| 87 | TspE15.F7 | — | 6066 pb | | 5100-5375 | (1414; 1413) | | |
| 88 | SauE15.I4 | 267058-381653 | 7890 pb | 6a | 6810-7006 | (1449; 1448) | + | |
| 88 | SauE15.N1 | 267058-381653 | 7890 pb | 6a | 2234-2436 | (1435; 1434) | | |
| 88 | TspE15.H11 | 267058-381653 | 7890 pb | | 4811-5050 | (1441; 1440) | + | |
| 88 | SauE4.H10 | 267058-381653 | 7890 pb | | 4849-5186 | (1441; 1440) | + | |
| 88 | SauE15.L7 | 267058-381653 | 7890 pb | | 7011-7150 | (1449; 1448) | | |
| 89 | SauE15.E8 | 2776123-1209029 | 5662 pb | | 756-1137 | (1458; 1457) | | |
| 89 | SauE15.N8 | 2776123-1209029 | 5662 pb | 3 | 345-603 | (1456; 1455)(1458 ; 1457) | | + |
| 89 | TspE15.D11 | 2776123-1209029 | 5662 pb | | 1592-1806 | (1460; 1459) | + | |
| 89 | TspE4.J12 | 2776123-1209029 | 5662 pb | | 4721-4910 | (1466; 1465) | | |
| 89 | TspE4.D1 | 2776123-1209029 | 5662 pb | 3 | 2904-3140 | (1464; 1463) | + | |
| 89 | TspE4.J10 | 2776123-1209029 | 5662 pb | | 5280-5524 | (1466; 1465) | | |
| 89 | SauE15.J12 | 2776123-1209029 | 5662 pb | | 3988-4091 | (1466; 1465) | | |
| 90 | TspE15.A1 | ?-4554943 | 1314 | | 1-273 | (1469; 1468) | + | |
| 90 | SauE15.I8 | ?-4554943 | 1314 | 6a | 713-1000 | (1469; 1468) | | |
| 91 | TspE4.J4 | — | 1581 pb | 1 | 274-505 | (1472:1471)(1474; 1473) | | + |
| 92 | SauE15.A6 | ?-529178 | 2725 pb | | 1281-1421 | (1477; 1476) | | |
| 93 | SauE4.I2 | — | 4577 pb | | 40-469 | (1484; 1483) | + | |
| 94 | SauE15.G1 | — | 2449 pb | | 1597-1738 | (1503; 1502) | | |
| 94 | SauE15.J2 | — | 2449 pb | 6b | 870-1195 | — | | |
| 94 | TspE4.K12 | — | 2449 pb | | 1074-1176 | — | | |
| 95 | TspE4.H12 | — | 3424 pb | j (Not l) | 1-285 | — | | |
| 96 | TspE15.D7 | — | 2051 pb | | 158-396 | (1519; 1518) | | |
| 96 | TspE4.L3 | — | 2051 pb | | 1-153 | (1519; 1518) | + | |
| 96 | SauE15.B1 | — | 2051 pb | | 1225-1412 | (1521; 1520) | + | |
| 97 | TspE4.C4 | 3597458-? | 364 pb | 4 | 145-325 | — | | |
| 98 | TspE4.F6 | — | 3624 pb | 3 | 2978-3221 | (1531; 1530) | + | |
| 99 | SauE15.C9 | 3833958-3835850 | 2286 | | 561-833e | (1536; 1535) | | |
| 99 | TspE4.G12 | 3833958-3835850 | 2286 | Not k | 1916-2089 | (1540; 1539) | + | |
| 100 | TspE4.G8 | — | 9416 pb | | 2188-2510 | (1543; 1542)(1545; 1544) | | + |
| 101 | SauE15.G9 | — | 2748 pb | 3 | 1654-1816 | (1564; 1563) | | |
| 101 | SauE4.D1 | — | 2748 pb | | 1048-1350 | (1564; 1563) | | |
| 48 | SauE15.H8 | 2068492-383159 | 5586 | | 1221-1528 | (721; 720) | | |
| | TspE4.J6 | 3652844-3652880 | | a (Not I) | 993-1153 | (730, 729)(732; 731) | | + |
| | SauE15.I11 | 3652844-3652880 | | | 2510-2671 | (732; 731) | | |
| | SauE4.E3 | 3652844-3652880 | | | 6146-6408 | (738; 737) | | |
| | TspE4.H2 | 3774655-3774666 | | u (Not I) | 547-749 | (747; 746) | | |
| | SauE15.L6 | 2067936-2774015 | 7977 | 6a | 1064-1330 | (752; 751) | | |
| | SauE4.H10 | 2067936-2774015 | | | 2947-3178 | — | | |
| | SauE4.E5 | 2067936-2774015 | | | 863-1059 | (752; 751) | | |
| | TspE15.H11 | 2067936-2774015 | | | 3069-3356 | — | | |
| | SauE15.N1 | 2067936-2774015 | | 6a | 5749-5951 | (752; 751) | | |
| | TspE4.G12 | 2076461-3835850 | 2334 | k (Not I) | 1706-1878 | (773; 772) | | |
| | sauE15.B12 | 2945708-? | 28820 | | 691-1196 | (776; 775)(778; 777) | | + |
| | SauE15.E10 | 2945708-? | | | 25007-25161 | (806; 805)(808; 807) | | + |
| 54 | SauE15.A11 | 1588103-1588103 | | c (NotI) | 1004-1128 | (817; 816) | | |
| 55 | SauE15.I1 | 1413657-1182865 | 2179 | | 442-583 | (824; 823) | | |
| 56 | TspE4.G1 | 3273109-239363 | | 1 | 47800-47958 | — | | |
| 57 | TspE15.E8 | 316624-316663 | 726 | | 220-380 | — | | |
| 58 | SauE15.F9 | 2056048-2060342 | | | 2445-2581 | (929; 928) | | |
| 58 | SauE15.H5 | 2056048-2060342 | | | 5839-6038 | (933; 932) | | |
| 58 | TspE4.F10 | 2056048-2060342 | | r (Not I) | 9684-9948 | (935; 934) | | |
| 58 | SauE4.E6 | 2056048-2060342 | | | 16929-17038 | (941; 940) | | |
| 58 | SauE4.C11 | 2056048-2060342 | | | 25143-25397 | (947; 946) | | |
| 58 | SauE15.M8 | 2056048-2060342 | | | 28203-28351 | (947; 946) | | |
| 58 | SauE4.H1 | 2056048-2060342 | | | 32821-33005 | (955; 954) | | |
| 58 | TspE4.A11 | 2056048-2060342 | | | 43906-44194 | (961; 960) | | |
| 58 | SauE4.C6 | 2056048-2060342 | | | 48042-48155 | (971; 970) | + | |
| 59 | SauE4.F10 | 1643312-1646494 | | | 3555-3795 | (990; 989)(992; 991) | | + |
| 60 | SauE15.L6 | ?-2068295 | | 6a | | | | |
| 61 | SauE4.B1 | 1425451-? | | | | | | |

[0322] TABLE 9

| | | Sequence | | | | | | | | |
|---|---|---|---|---|---|---|---|---|---|---|
| | | homolog | Identity | | Sequence | Identity | | Sequence | Identity | |
| | | E. coli to | (DNA | | homolog to | (DNA | | homolog to E. | (DNA | |
| fragment | Size (in bp) | RS218 | level) (%) | expect | coli O157: H7 | level) (%) | expect | E.coli CFT073 | level) (%) | expect |
| 1 | 1312 | 18-1311 | 99 | 0.0 | — | — | — | 1-1312 | 100 | 0.0 |
| 2 | 7316 | 4-7315 | 96 | 0.0 | 10-7315 | 96 | 0.0 | 1-7316 | 100 | 0.0 |
| 3 | 5203 | 1781-5094 | 99 | 0.0 | — | — | — | 1-5203 | 100 | 0.0 |
| 4 | 1584 | 1-1585 | 98 | 0.0 | — | — | — | 1-1584 | 100 | 0.0 |
| 5 | 2444 | 1-2443 | 99 | 0.0 | 1811-1926 | 92 | 1E−33 | 1-2444 | 100 | 0.0 |
| 5 | 2444 | | | | | | | 1-2444 | 100 | 0.0 |
| 6 | 8644 | 323-3755 | 99 | 0.0 | — | — | — | 1-8644 | 100 | 0.0 |
| | | 4926-6323 | 99 | 0.0 | — | — | — | | | |
| | | 6723-8643 | 99 | 0.0 | — | — | — | | | |
| 7 | 1835 | 1-1834 | 99 | 0.0 | 88-1834 | 95 | 0.0 | 1-1835 | 100 | 0.0 |
| 8 | 7648 | 1-7646 | 99 | 0.0 | — | — | — | 1-7648 | 100 | 0.0 |
| 8 | 7648 | | | | — | — | — | 1-7648 | 100 | 0.0 |
| 8 | 7648 | | | | — | — | — | 1-7648 | 100 | 0.0 |
| 8 | 7648 | | | | — | — | — | 1-7648 | 100 | 0.0 |
| 8 | 7648 | | | | — | — | — | 1-7648 | 100 | 0.0 |
| 9 | 9137 | 4-354 | 94 | 1E−148 | — | — | — | 1-9137 | 100 | 0.0 |
| | | 424-3186 | 98 | 0.0 | — | — | — | | | |
| | | 3899-5114 | 97 | 0.0 | — | — | — | | | |
| | | 5487-7279 | 99 | 0.0 | — | — | — | | | |
| | | 8553-9129 | 98 | 0.0 | — | — | — | | | |
| 10 | 665 | 1-666 | 99 | 0.0 | 5-665 | 98 | 0.0 | 1-665 | 100 | 0.0 |
| 11 | 4144 | 175-4046 | 95 | 0.0 | — | — | — | 1-4144 | 100 | 0.0 |
| 11 | 4144 | | | | — | — | — | 1-4144 | 100 | 0.0 |
| 11 | 4144 | | | | — | — | — | 1-4144 | 100 | 0.0 |
| 12 | 5426 | 1-5313 | 98 | 0.0 | — | — | — | 1-5426 | 100 | 0.0 |
| 13 | 8681 | 471-2118 | 96 | 0.0 | — | — | — | 1-8681 | 100 | 0.0 |
| 13 | 8681 | 2332-3189 | 97 | 0.0 | — | — | — | 1-8681 | 100 | 0.0 |
| | | 3374-8682 | 99 | 0.0 | — | — | — | | | |
| 14 | 9973 | 289-2790 | 98 | 0.0 | 93-427 | 82 | 1E−51 | 1-9973 | 100 | 0.0 |
| 14 | 9973 | 3531-5231 | 99 | 0.0 | | | | 1-9973 | 100 | 0.0 |
| | | 5408-9974 | 99 | 0.0 | | | | | | |
| 15 | 1370 | 1-1360 | 99 | 0.0 | 5-1360 | 97 | 0.0 | 1-1370 | 100 | 0.0 |
| 16 | 1692 | 698-1462 | 93 | 0.0 | 1193-1486 | 93 | E−117 | 1-1692 | 100 | 0.0 |
| 16 | 1692 | | | | | | | 1-1692 | 100 | 0.0 |
| 17 | 3761 | 1-308 | 94 | E−134 | — | — | — | 1-3761 | 100 | 0.0 |
| 17 | 3761 | | | | — | — | — | 1-3761 | 100 | 0.0 |
| 18 | 726 | 11-727 | 98 | 0.0 | — | — | — | 1-726 | 100 | 0.0 |
| 19 | 3270 | 1-310 | 98 | 1E−161 | — | — | — | 1-3270 | 100 | 0.0 |
| | | 569-1132 | 87 | 1E−158 | — | — | — | | | |
| | | 2285-3271 | 98 | 0.0 | — | — | — | | | |
| 20 | 4585 | 1-2302 | 98 | 0.0 | 4044-4197 | 91 | 2E−51 | 1-4585 | 100 | 0.0 |
| 20 | 4585 | 4014-4586 | 98 | 0.0 | | | | 1-4585 | 100 | 0.0 |
| 20 | 4585 | | | | | | | 1-4585 | 100 | 0.0 |
| 21 | 1951 | 1-875 | 98 | 0.0 | 5-1763 | 92 | 0.0 | 1-1951 | 100 | 0.0 |
| | | 1410-1952 | 95 | 0.0 | 1795-1929 | 88 | 3E−33 | | | |
| 22 | 2981 | 1-2980 | 96 | 0.0 | 4-2980 | 93 | 0.0 | 1-2981 | 100 | 0.0 |
| 23 | 1036 | -1035 | 98 | 0.0 | — | — | — | 1-1036 | 100 | 0.0 |
| 24 | 6318 | 865-6018 | 99 | 0.0 | 4-6317 | 96 | 0.0 | 1-6318 | 100 | 0.0 |
| 24 | 6318 | 6076-6317 | 99 | 1E−130 | | | | 1-6318 | 100 | 0.0 |
| 24 | 6318 | | | | | | | 1-6318 | 100 | 0.0 |
| 24 | 6318 | | | | | | | 1-6318 | 100 | 0.0 |
| 25 | 7325 | 1-7326 | 99 | 0.0 | — | — | — | 1-7325 | 100 | 0.0 |
| 26 | 712 | — | — | — | — | — | — | 1-712 | 100 | 0.0 |
| 27 | 13757 | 1-9589 | 98 | 0.0 | — | — | — | 1-13757 | 100 | 0.0 |
| 27 | 13757 | 9410-9681 | 85 | 6E−45 | — | — | — | 1-13757 | 100 | 0.0 |
| 27 | 13757 | 9724-13757 | 99 | 0.0 | — | — | — | 1-13757 | 100 | 0.0 |
| 28 | 12263 | 1-242 | 98 | 1E−125 | 1-416 | 96 | 0.0 | 1-12263 | 100 | 0.0 |
| 28 | 12263 | 126-410 | 93 | 1E−119 | 2480-2584 | 92 | 1E−33 | 1-12263 | 100 | 0.0 |
| 28 | 12263 | 396-6463 | 98 | 0.0 | 5668-5873 | 89 | 2E−60 | 1-12263 | 100 | 0.0 |
| 28 | 12263 | 6713-12264 | 98 | 0.0 | 10957-12264 | 96 | 0.0 | 1-12263 | 100 | 0.0 |
| 28 | 12263 | | | | | | | 1-12263 | 100 | 0.0 |
| 28 | 12263 | | | | | | | 1-12263 | 100 | 0.0 |
| 29 | 4871 | 697-814 | 88 | 7E−30 | 1503-3365 | 96 | 0.0 | 1-4871 | 100 | 0.0 |
| 29 | 4871 | 1128-1203 | 97 | 4E−31 | 702-808 | 87 | 3E−23 | 1-4871 | 100 | 0.0 |
| 29 | 4871 | 1503-4825 | 94 | 0.0 | 1128-1203 | 93 | 7E−24 | 1-4871 | 100 | 0.0 |
| 30 | 2777 | 1-2259 | 90 | 0.0 | 1943-2128 | 88 | 2E−47 | 1-2777 | 100 | 0.0 |
| 30 | 2777 | | | | | | | 1-2777 | 100 | 0.0 |
| 31 | 7655 | 1-3985 | 99 | 0.0 | 7195-7345 | 94 | 7E−59 | 1-7655 | 100 | 0.0 |
| 31 | 7655 | 4403-7654 | 99 | 0.0 | | | | 1-7655 | 100 | 0.0 |
| 32 | 6000 | 1-5999 | 97 | 0.0 | 1-252 | 99 | 1E−136 | 1-6000 | 100 | 0.0 |
| | | | | | 1290-1936 | 95 | 0.0 | | | |
| | | | | | 1950-2172 | 94 | 2E−94 | | | |
| | | | | | 2218-5309 | 93 | 0.0 | | | |
| | | | | | 5462-5999 | 89 | 1E−180 | | | |
| 33 | 2497 | 1-1880 | 97 | 0.0 | — | — | — | 1-2797 | 100 | 0.0 |
| | | 2120-2498 | 99 | 0.0 | — | — | — | | | |
| 34 | 3707 | 1-3708 | 99 | 0.0 | — | — | — | 1-3707 | 100 | 0.0 |
| 35 | 4821 | 1-4820 | 94 | 0.0 | — | — | — | 1-4821 | 100 | 0.0 |
| 36 | 7267 | 1-6977 | 99 | 0.0 | | | | 1-7267 | 100 | 0.0 |
| 36 | 7267 | 7009-7268 | 99 | 1E−143 | — | — | — | 1-7267 | 100 | 0.0 |
| 37 | 16066 | 1-15238 | 98 | 0.0 | — | — | — | 1-16066 | 100 | 0.0 |
| 37 | 16066 | 15594-16066 | 98 | 0.0 | — | — | — | 1-16066 | 100 | 0.0 |
| 37 | 16066 | | | | — | — | — | 1-16066 | 100 | 0.0 |
| 37 | 16066 | | | | — | — | — | 1-16066 | 100 | 0.0 |
| 38 | 5601 | 13-5602 | 99 | 0.0 | — | — | — | 1-5601 | 100 | 0.0 |
| 39 | 2703 | 128-2702 | 99 | 0.0 | 17-2702 | 93 | 0.0 | 1-2703 | 100 | 0.0 |
| 40 | 12101 | 1-10426 | 98 | 0.0 | — | — | — | 1-12101 | 100 | 0.0 |
| | | 10809-12102 | 97 | 0.0 | — | — | — | | | |
| 41 | 1423 | 1-1248 | 97 | 0.0 | — | — | — | 1-1423 | 100 | 0.0 |
| 42 | 3129 | 1-111 | 95 | 5E−45 | 1-1447 | 93 | 0.0 | 1-3129 | 100 | 0.0 |
| 43 | 5571 | 17-2829 | 93 | 0.0 | — | — | — | 1-5571 | 100 | 0.0 |
| | | 2959-5572 | 98 | 0.0 | — | — | — | | | |
| 44 | 8739 | 1-4516 | 98 | 0.0 | 121-7288 | 95 | 0.0 | 1-8739 | 100 | 0.0 |
| | | 4628-7434 | 96 | 0.0 | 7629-8729 | 90 | 0.0 | | | |
| | | 7611-8738 | 94 | 0.0 | | | | | | |
| 45 | 3245 | 1-900 | 99 | 0.0 | — | — | — | 1-3245 | 100 | 0.0 |
| 45 | 3245 | 1859-3244 | 97 | 0.0 | — | — | — | 1-3245 | 100 | 0.0 |
| 46 | 6164 | 1-6164 | 99 | 0.0 | — | — | — | 1-6164 | 100 | 0.0 |
| 46 | 6164 | | | 0.0 | — | — | — | 1-6164 | 100 | 0.0 |
| 47 | 1478 | 1-97 | 99 | 0.0 | — | — | — | 1-1478 | 100 | 0.0 |
| | | 320-1477 | 99 | 0.0 | — | — | — | | | |
| 48 | 5586 | 1-341 | 99 | 0.0 | 1-1965 | 98 | 0.0 | 1-5586 | 100 | 0.0 |
| | | 2018-5585 | 98 | 0.0 | 2023-2417 | 86 | 1E−102 | | | |
| | | | | | 2448-3811 | 89 | 0.0 | | | |
| 49 | 9054 | 1-5807 | 99 | 0.0 | 1-9054 | 96 | 0.0 | 1-9054 | 100 | 0.0 |
| 49 | 9054 | 7084-9054 | 98 | 0.0 | | | | | | |
| 49 | 9054 | | | | | | | | | |
| 50 | 6678 | 1-1419 | 93 | 0.0 | 1249-1432 | 85 | 2e−42 | 1-6678 | 100 | 0.0 |
| | | 2753-3219 | 93 | 0.0 | 4529-4800 | 91 | 1e−97 | | | |
| | | 5276-6678 | 97 | 0.0 | 5114-5520 | 83 | 1e−75 | | | |
| | | | | | 5595-6627 | 90 | 0.0 | | | |
| 51 | 7977 | 1509-3178 | 85 | 0.0 | 1-149 | 89 | e−48 | 1-7977 | 100 | 0.0 |
| 51 | 7977 | 5018-8184 | 97 | 0.0 | 346-775 | 89 | e−129 | | | |
| 51 | 7977 | | | | 7870-8184 | 86 | 2e−71 | | | |
| 51 | 7977 | | | | | | | | | |
| 51 | 7977 | | | | | | | | | |
| 52 | 2334 | 1-698 | 89 | 0.0 | 1-821 | 92 | 0.0 | 1-2334 | 100 | 0.0 |
| | | 978-2075 | 97 | 0.0 | | | | | | |
| 53 | 28820 | 57-2414 | 98 | 0.0 | — | — | — | 1-28820 | 100 | 0.0 |
| 53 | 28820 | 2691-4828 | 96 | 0.0 | | | | | | |
| | | 5297-11491 | 94 | 0.0 | | | | | | |
| | | 17104-18095 | 95 | 0.0 | | | | | | |
| | | 18785-20658 | 93 | 0.0 | | | | | | |
| | | 20826-28816 | 96 | 0.0 | | | | | | |
| 54 | 3281 | 1-282 | 99 | e−156 | 3-3279 | 96 | 0.0 | 1-3281 | 100 | 0.0 |
| | | 1086-3281 | 99 | 0.0 | | | | | | |
| 55 | 2179 | 9-617 | 99 | 0.0 | 1-2177 | 99 | 0.0 | 1-2179 | 100 | 0.0 |
| 56 | 48255 | 1-757 | 92 | 0.0 | 157-282 | 89 | 7e−34 | 1-48255 | 100 | 0.0 |
| | | 16613-16737 | 99 | 1e−61 | 327-761 | 84 | 2e−92 | | | |
| | | 17612-17835 | 85 | 2e−44 | 897-10117 | 97 | 0.0 | | | |
| | | 18068-18386 | 89 | e−103 | 11910-15258 | 94 | 0.0 | | | |
| | | 19103-20896 | 90 | 0.0 | 10376-10482 | 92 | 2e−34 | | | |
| | | 31049-32357 | 94 | 0.0 | 31049-32358 | 96 | 0.0 | | | |
| | | 33012-34582 | 91 | 0.0 | 48126-48205 | 91 | 9e−21 | | | |
| | | 47503-48254 | 95 | 0.0 | | | | | | |
| 57 | 726 | 1-561 | 98 | 0.0 | 1-561 | 96 | 0.0 | 1-726 | 100 | 0.0 |
| 58 | 48732 | 1-19781 | 98 | 0.0 | 46834-46991 | 92 | 2e−55 | 1-48732 | 100 | 0.0 |
| 58 | 48732 | 20058-24723 | 95 | 0.0 | | | | | | |
| 58 | 48732 | 24876-32641 | 98 | 0.0 | | | | | | |
| 58 | 48732 | 32783-40366 | 99 | 0.0 | | | | | | |
| 58 | 48732 | 41090-47187 | 97 | 0.0 | | | | | | |
| 58 | 48732 | 47568-48715 | 98 | 0.0 | | | | | | |
| 58 | 48732 | | | | | | | | | |
| 58 | 48732 | | | | | | | | | |
| 58 | 48732 | | | | | | | | | |
| 59 | 4810 | 49-173 | 96 | 9e−51 | 49-197 | 91 | 2e−48 | 1-4810 | 100 | 0.0 |
| | | 1812-3795 | 94 | 0.0 | 1812-2707 | 89 | 0.0 | | | |
| | | | | | 2840-3797 | 82 | <e−100 | | | |
| | | | | | 4676-4809 | 94 | 6e−49 | | | |
| 60 | 27324 | 1472-1908 | 92 | e−172 | 1907-3997 | 93 | 0.0 | 1-27324 | 100 | 0.0 |
| | | 3136-4010 | 83 | <e−100 | | | | | | |
| 61 | 5207 | 1-5203 | 95 | 0.0 | 1-106 | 88 | 5e−25 | 1-5207 | 100 | 0.0 |
| | | | | | 230-4088 | 94 | 0.0 | | | |
| | | | | | 4318-5203 | 88 | 0.0 | | | |
| 62 | 16244 | 2-452 | 94 | 0.0 | 2-497 | 93 | 0.0 | 1-16244 | 100 | 0.0 |
| 62 | 16244 | 584-1292 | 93 | 0.0 | 612-1052 | 93 | 0.0 | | | |
| 62 | 16244 | 1396-4430 | 97 | 0.0 | 6607-7916 | 96 | 0.0 | | | |
| 62 | 16244 | 6606-7916 | 93 | 0.0 | 14096-15407 | 96 | 0.0 | | | |
| | | 8396-8985 | 88 | 2e−168 | | | | | | |
| | | 9117-9968 | 88 | 0.0 | | | | | | |
| | | 14100-15407 | 94 | 0.0 | | | | | | |
| 63 | 5307 | 1-2863 | 99 | 0.0 | — | — | — | 1-5307 | 100 | 0.0 |
| | | 4182-5307 | 99 | 0.0 | | | | | | |
| 64 | 6202 | 53-880 | 96 | 0.0 | 53-1042 | 94 | 0.0 | 1-6202 | 100 | 0.0 |
| | | 1111-6921 | 99 | 0.0 | | | | | | |
| 65 | 12133 | 1-1894 | 95 | 0.0 | 1518-1868 | 81 | 2e−44 | 1-12133 | 100 | 0.0 |
| | | 6071-8577 | 95 | 0.0 | 7357-7808 | 80 | e−44 | | | |
| | | 10442-11371 | 92 | 0.0 | | | | | | |
| 66 | 41818 | 1-926 | 93 | 0.0 | 9126-9752 | 97 | 0.0 | 1-41818 | 100 | 0.0 |
| 66 | 41818 | 1111-1758 | 95 | 0.0 | 19485-20595 | 91 | 0.0 | | | |
| | | 1894-2366 | 88 | <e−87 | 21340-21578 | 90 | 5e−78 | | | |
| | | 2812-3115 | 88 | 2e−87 | 26296-26624 | 89 | e−104 | | | |
| | | 3314-3798 | 90 | e−160 | 30651-31490 | 88 | 0.0 | | | |
| | | 7211-7637 | 89 | e−125 | | | | | | |
| | | 26291-26624 | 89 | <e−103 | | | | | | |
| | | 30676-31490 | 90 | 0.0 | | | | | | |
| | | 32016-32675 | 97 | 0.0 | | | | | | |
| | | 32950-34421 | 97 | 0.0 | | | | | | |
| | | 35370-38907 | 97 | 0.0 | | | | | | |
| | | 38942-41136 | 98 | 0.0 | | | | | | |
| | | 38942-41808 | 95 | 0.0 | | | | | | |
| 67 | 1374 | 4-300 | 95 | e−113 | — | — | — | 1-1374 | 100 | 0.0 |
| | | 366-1371 | 98 | 0.0 | — | — | — | | | |
| 68 | 15368 | 1-1548 | 99 | 0.0 | 8815-9112 | 95 | e−34 | 1-15368 | 100 | 0.0 |
| 68 | 15368 | 1714-3699 | 98 | 0.0 | 9559-10669 | 93 | 0.0 | | | |
| | | 4264-15368 | 99 | 0.0 | 10749-13990 | 97 | 0.0 | | | |
| | | | | | 15226-15322 | 94 | 7e−136 | | | |
| 69 | 16373 | 653-1938 | 95 | 0.0 | 39-465 | 88 | e−126 | 1-16373 | 100 | 0.0 |
| 69 | 16373 | 10000-10275 | 91 | e−100 | 2818-3271 | 94 | 0.0 | | | |
| 69 | 16373 | 11917-13696 | 87 | 0.0 | 10920-13762 | 93 | 0.0 | | | |
| 69 | 16373 | | | | | | | | | |
| 70 | 1350 | 834-1350 | 98 | 0.0 | — | — | — | 1-1350 | 100 | 0.0 |
| 70 | 1350 | | | | | | | | | |
| 71 | 11475 pb | 1-11475 | 100 | 0.0 | — | — | — | — | — | — |
| 71 | 11475 pb | | | | | | | | | |
| 71 | 11475 pb | | | | | | | | | |
| 72 | 4576 pb | 1-4576 | 100 | 0.0 | — | — | — | — | — | — |
| 72 | 4576 pb | | | | | | | | | |
| 72 | 4576 pb | | | | | | | | | |
| 72 | 4576 pb | | | | | | | | | |
| 73 | 1906 pb | 1-1906 | 100 | 0.0 | 436-1127 | 91% | 0.0 | 437-1127 | 91% | 0.0 |
| | | | | | 1207-1507 | 88% | 2e-84 | 1207-1507 | 87% | 2e−80 |
| 74 | 2536 pb | 1-2536 | 100 | 0.0 | 0-2536 | 98% | 0.0 | — | — | — |
| 75 | 894 pb | 1-894 | 100 | 0.0 | 659-852 | 81% | 5e−21 | — | — | — |
| 76 | 747 pb | 1-747 | 100 | 0.0 | 15-747 | 98% | 0.0 | — | — | — |
| 77 | 886 pb | 1-886 | 100 | 0.0 | — | — | — | — | — | — |
| 78 | 4892 pb | 1-4892 | 100 | 0.0 | — | — | — | — | — | — |
| 79 | 6927 pb | 1-6927 | 100 | 0.0 | — | — | — | — | — | — |
| 80 | 10848 pb | 1-10848 | 100 | 0.0 | 3036-4346 | 95% | 0.0 | 3037-4346 | 96% | 0.0 |
| | | | | | | | | (IS629) | | |
| 80 | 10848 pb | | | | 2834-3001 | 84% | 4e−24 | | | |
| 81 | 1716 pb | 1-1716 | 100 | 0.0 | 1174-1387 | 94% | 6e−93 | 1175-1358 | 94% | 7e−77 |
| 82 | 200 pb | 1-200 | 100 | 0.0 | — | — | — | — | — | — |
| 83 | 5873 pb | 1-5873 | 100 | 0.0 | — | — | — | 1-991 | 95% | 0.0 |
| 83 | 5873 pb | | | | | | | | | |
| 83 | 5873 pb | | | | | | | | | |
| 84 | 4737 pb | 1-4737 | 100 | 0.0 | — | — | — | — | — | — |
| 84 | 4737 pb | | | | | | | | | |
| 84 | 4737 pb | | | | | | | | | |
| 85 | 4386 pb | 1-4386 | 100 | 0.0 | 1-584 | 96% | 0.0 | 217-625 | 89% | e−132 |
| 85 | 4386 pb | | | | 4252-4379 | 89% | 3e−29 | 4249-4379 | 87% | 4e−28 |
| 86 | 5819 pb | 1-5819 | 100 | 0.0 | 3431-3882 | 82% | 3e−76 | 3383-5819 | 95% | 0.0 |
| 86 | 5819 pb | | | | 5417-5571 | 85% | 6e−28 | | | |
| 86 | 5819 pb | | | | | | | | | |
| 87 | 6066 pb | 1-6066 | 100 | 0.0 | 664-1166 | 83% | 9e−95 | — | — | — |
| 87 | 6066 pb | | | | 3049-3625 | 81% | 1e−81 | | | |
| 87 | 6066 pb | | | | 2628-2885 | 84% | 1e−44 | | | |
| | | | | | 361-545 | 83% | 2e−24 | | | |
| 88 | 7890 pb | 1-7890 | 100 | 0.0 | 1-315 | 86% | 2e−71 | 1-3167 | 97% | 0.0 |
| 88 | 7890 pb | | | | | | | 5813-6648 | 96% | 0.0 |
| 88 | 7890 pb | | | | | | | 5381-5699 | 91% | e−114 |
| 88 | 7890 pb | | | | | | | 5078-5348 | 89% | 4e−85 |
| 88 | 7890 pb | | | | | | | 4798-4953 | 81% | 2e−25 |
| 89 | 5662 pb | 1-5622 | 100 | 0.0 | 3000-3323 | 85% | 1e−69 | 2775-3323 | 93% | 0.0 |
| 89 | 5662 pb | | | | 2271-2617 | 80% | 2e−37 | 3324-3403 | 91% | 2e−21 |
| 89 | 5662 pb | | | | | | | | | |
| 89 | 5662 pb | | | | | | | | | |
| 89 | 5662 pb | | | | | | | | | |
| 89 | 5662 pb | | | | | | | | | |
| 89 | 5662 pb | | | | | | | | | |
| 90 | 1314 | 1-1314 | 100 | 0.0 | — | — | — | — | — | — |
| 90 | 1314 | | | | | | | | | |
| 91 | 1581 pb | 1-1581 | 100 | 0.0 | — | — | — | — | — | — |
| 92 | 2725 pb | 1-2725 | 100 | 0.0 | 160-2355 | 96% | 0.0 | 1-2483 | 94% | 0.0 |
| | | | | | 2362-2483 | 98% | 1e−58 | 2585-2652 | 95% | 5e−24 |
| 93 | 4577 pb | 1-4577 | 100 | 0.0 | — | — | — | — | — | — |
| 94 | 2449 pb | 1-2449 | 100 | 0.0 | — | — | — | 1-415 | 94% | 0.0 |
| 94 | 2449 pb | | | | | | | 794-1255 | 95% | 0.0 |
| 94 | 2449 pb | | | | | | | 555-632 | 98% | 6e−35 |
| 95 | 3424 pb | 1-3424 | 100 | 0.0 | 5-278 | 95% | e−123 | — | — | — |
| 96 | 2051 pb | 1-2051 | 100 | 0.0 | — | — | — | — | — | — |
| 96 | 2051 pb | | | | | | | | | |
| 96 | 2051 pb | | | | | | | | | |
| 97 | 364 pb | 1-364 | 100 | 0.0 | — | — | — | — | — | — |
| 98 | 3624 pb | 1-3624 | 100 | 0.0 | — | — | — | 1-918 | 96% | 0.0 |
| 99 | 2286 | 1-2286 | 100 | 0.0 | — | — | — | 1188-2286 | 97% | 0.0 |
| 99 | 2286 | | | | | | | | | |
| 100 | 9416 pb | 1-9416 | 100 | 0.0 | — | — | — | — | — | — |
| 101 | 2748 pb | 1-2748 | 100 | 0.0 | — | — | — | — | — | — |
| 101 | 2748 pb | | | | | | | | | |

[0323] Apart from zone 24 and its orfs/ORFs which correspond to known products which are of known nature B2+A−, none of the sequences identified herein is strictly identical to a sequence of the prior art (comparison of the nucleotide series over their entire length, independently of the function of the process). However, when comparing the complete sequence of these CFT073+K12− zones and RS218+ K12− zones with those indicated for the E. coli strain O157:H7 (strain of phylogenic group not clearly determined, responsible for infections located in the intestine), some homologies are found as it appears from table 9 above.

[0324] With regard now to the ORFs which were identified on each of said zones, the percentage identity (% id) and percentage similarity (% sim) obtained at the polypeptide level by comparison on databases are given in FIG. 6.

[0325] This being so, for each of the CFT073+ K12− zones isolated herein, and for each of the orfs and ORFs identified herein (except zone 24 and its orfs/ORFs) as well as for each of the isolated RS218+/K12− zones, it is the first description of a nature CFT073+ K12− or RS218+/K12− respectively. These zones, orfs and ORFs therefore have, at the very least, applications in the domain of phylogeny (diagnostic applications) since these products make it possible to distinguish between two E. coli strains with very different pathogenicities. Anti-CFT073 or anti-RS218 vaccine applications might also be envisaged.

[0326] In addition, since the CFT073+ K12− and RS218+/K12− zones isolated herein all comprise, in the vicinity of their chromosome, at least one DNA fragment which is of nature B2/D+ A− as defined above (ECOR B2 frequency and/or ECOR D frequency higher than ECOR A frequency SEQ ID NO 1 to NO. 550, the zones and orfs isolated herein are excellent candidates as polynucleotides which are of nature B2/D+ A−. Those of the CFT073+ K12− ORFs and orfs which comprise in their sequence a clone which is of nature B2/D+ A− as defined in Example 1 above (SEQ ID NO 1 to NO 253) have an even higher probability of being products which are of nature B2/D+ A−.

[0327] Verifying that the CFT073+ K12− or RS218+/K12− zones, ORFs and orfs isolated herein are effectively of nature B2/D+ A− can be easily carried out by those skilled in the art according to techniques which are conventional in the domain of phylogeny. One way of making sure may, for example, consists in applying to at least one other E. coli strain of group B2 or D, for example E. coli C5, the procedure which has been described herein for the E. coli strain CFT073 and RS218, in such a way as to identify and isolate the zones, ORFs and orfs which are present in E. coli C5 and absent in E. coli K12 (or another E. coli strain of group A). The sequences of these C5+ K12− zones, ORFs and orfs are then compared with those of the CFT073+ K12− and RS218+ K12− groups described herein, while searching for homologous sequences and sequence fragments. This comparison can, for example, be carried out using the BLAST program (National Centre for Biotechnology Information, NCBI, Altschul et al. 1997, Nucleic Acids Res. 25: 3389-3402), comparing each sequence of the C5+ K12− group with those of the CFT073+ K12− (or RS218+ K12−) group. The polynucleotide sequences, or fragments of polynucleotide sequence, with a low probability of the significant homology (for example, identity of 80% or more) being linked by chance can then be selected as being of nature B2/D+ A−, as defined above. If desired, the process can be repeated on a fourth or fifth E. coli strain of group B2 or D.

[0328] Such B2/D+ A− products are particularly useful for the phylogenic determination of E. coli.

[0329] The polynucleotides which are of nature B2/D+ A− and their inactivated isogenic mutants can be used, in the form of isolated DNAs (placed under the control of a eukaryotic promoter or in the form of DNA transfected into a cell), as active principles in a vaccine composition intended to prevent, alleviate or combat an undesirable development of E. coli, and in particular a development of E. coli in an extra-intestinal compartment. The ORFs themselves, administered in an optionally inactivated and immunogenic form, are active principles which are very promising for the development of a vaccine composition intended to prevent, alleviate or combat an undesirable development of E. coli, and in particular a development of E. coli in an extra-intestinal compartment.

[0330] The polynucleotides and polypeptides which are of nature B2/D+ A− can also be used as anti-pathogenicity targets (with extra-intestinal and non intra-intestinal targeting); they make it possible to identify and isolate capable active principles which can be used in pharmaceutical compositions (medicinal products in particular) intended to inhibit the growth of an E. coli bacterium and, notably, its extra-intestinal development, by selecting, from candidate active principles, those which inhibit or block the correct transcription and/or translation of these zones or orfs, or which inhibit or block the activity of the ORFS.

[0331] The present application is aimed towards each of these CFT073+ K12− and RS218+/K12− zones, numbers 1 to 23, 25 to 48, and 49 to 101, also their ORFs and orfs, as products. It is also aimed towards any vaccine or pharmaceutical composition intended to prevent, alleviate or combat an undesirable development of E. coli, and in particular an extra-intestinal development of E. coli, which comprises at least one of said zones or at least one of said orfs and ORFs.

[0332] Particularly targeted are the zones, ORFs and orfs which are both CFT073+ K12− and RS218+ K12−. When the applications targeted concern a development of E. coli in an extra-intestinal compartment (systemic and non-diarrhoeal E. coli infection), those of said CFT073+ K12−, RS218+ K12− zones, orfs and ORFs which are also O157:H7− are then preferred.

[0333] The present application is thus directed towards any isolated polynucleotide the sequence of which can be obtained by:

[0334] i. isolating a set of polynucleotide sequences of a strain of group B2 or D (such as E. coli RS218, E. coli CFT073 or E. coli C5) by:

[0335] locating, on the chromosome of this E. coli strain of group B2, sequences which exhibit, with the clones of SEQ ID NO 1-153 and 170-253, homology such that the probability of this homology being due to chance is very low, for example an homology above 80% of identity and

[0336] sequencing the chromosome of this E. coli strain of group B2 or D in the 5′ and 3′ directions, using each of the homologous sequences located, and stopping the sequencing as soon as a sequence is reached which exhibits significant homology above 80% of identity with a sequence contained in the chromosome of an E. coli strain of group A, such as E. coli K12,

[0337] ii. repeating the operation indicated in i. above on at least one other E. coli strain of group B2 or D, then

[0338] iii. comparing the sequences obtained for each E. coli of group B2 or D tested in such as way as to search for the sequences and sequence fragments which are homologous, among the various E. coli strains of group B2 or D tested (for example, using a program such as BLAST).

[0339] iv. selecting and isolating the sequences and sequence fragments which exhibit significant homology above 80% of identity, of the homology measured between a sequence or sequence fragment derived from the set obtained in i. and a sequence or sequence fragment obtained in ii. being due to chance).

[0340] The present application is also aimed towards the possible orfs identifiable on such a polynucleotide, and the ORFs and polypeptides encoded by these orfs.

[0341] The present application is also aimed towards the phylogenic, diagnostic and therapeutic applications and uses of these products, as indicated above.

### EXAMPLE 7

[0342] Therapeutic Application of the Novel B2/D+ A− Products

[0343] The B2/D+ A− DNAs isolated according to the invention are useful as active principles in the context of a vaccine composition intended to prevent, alleviate or combat an undesirable development of E. coli, and in particular a development of E. coli in an extra-intestinal compartment (systemic and non-diarrhoeal E. coli infections). They can then be used in an isolated (“naked” DNA) form or in the form of DNA transfected into a cell chosen for its physiological innocuity and its capacity to secrete the polypeptide encoded by the transfected B2/D+ A− fragment.

[0344] The polypeptides encoded by the DNAs which are of nature B2/D+ A− can also be used as active principles in the context of such vaccine compositions. They are then used in an inactivated and immunogenic form.

[0345] Examples of extra-intestinal development of E. coli comprise, in particular, septicaemias, pyelonephritis, and meningeal infections in newborns. Recognized or potential hospital-acquired infections are most commonly the product of such extra-intestinal developments of E. coli.

[0346] For extra-intestinal applications, those of the DNAs and of the polypeptides which are of nature B2/D+ A− and which are not present in the E. coli strains responsible for infections located in the intestine, such as E. coli O157:H7, and/or the transcripts of which are increased in the serum by comparison with a culture on standard nutrient medium (cf. Example 3 above), are more particularly preferred.

[0347] Region 5 (cf. in particular previous examples) appears to be an advantageous source for manufacturing broad-spectrum anti-B2-coli products. As regards regions 1, 3 and 4, they appear to be advantageous sources for manufacturing products against septicaemia with meningitis and in particular against meningitis in newborns and in adults.

[0348] The invention is aimed in particular towards the compositions, in particular the vaccine and pharmaceutical compositions, comprising at least one of said novel DNAs or at least one of said novel ORFs or at least one polypeptide the sequence of which can be considered to correspond, according to the universal genetic code and taking into account the degeneracy of this code, to one of these DNAs or ORFs. It is also aimed towards the use of the known DNAs which are of novel nature B2/D+ A−, such as chuA, the chuA fragments which are of nature B2/D+ A−, and of the polypeptides corresponding to these DNAs, for manufacturing such compositions.

[0349] Alternatively, the DNAs or polypeptides which are of nature B2/D+ A− can be used for screening chemical and/or biological libraries in such a way as to identify compounds capable of binding to them and of blocking an undesirable development of E. coli bacteria (by blocking the correct transcription and/or translation of these DNAs, or by blocking the activity of the polypeptides which they encode).

[0350] The formulation and the dose of such compositions can be developed and adjusted by those skilled in the art as a function of the medical indication targeted, of the method of administration desired, and of the patient under consideration (age, weight, sex, condition).

[0351] These compositions can also comprise one or more physiologically inert vehicles, and in particular any excipient suitable for the pharmaceutical formulation and/or for the method of administration desired (tablet, patch, gelatin capsule, powder, spray, drinkable solution, injectable solution, colloid). They can also comprise one or more active co-agent(s) in order to modify the intensity of activity of the B2/D+ A− compound according to the invention, or to modify its system of activity, or alternatively to modify the targeting of its activity. They can also comprise other agents useful for preventing and/or alleviating and/or treating an infection, without these agents having any interaction with the B2/D+ A− compounds according to the invention.

[0352] Preferably, the polynucleotides and polypeptides which are of nature B2/D+ A− according to the invention are used for identifying, for example by screening chemical and/or biological libraries, compounds capable of inhibiting, in vivo or under conditions mimicking as closely as possible the in vivo state, the activity of a protein the ORF of which comprises a polynucleotide which is of nature B2/D+ A− according to the invention. Such compounds can, in particular, be used in compositions, in particular pharmaceutical compositions, intended to inhibit the growth of E. coli, and in particular its extra-intestinal growth. A subject of the present invention is such an identification method, the compounds as obtained by such a method, and such compositions.

### EXAMPLE 8

[0353] Animal Models for Studying E. coli Virulence

[0354] 1. Newborn rats (Sprague Dawley—January breeding) after 24 hours of acclimatisation in animal houses were infected when 5 days old. The injected inoculum was prepared from dilutions in physiological serum in a nutritive culture medium of 2 h. The animals were infected by intra-peritoneal route after anesthesia with ether, then put back to their mother after randomization by brood of ten.

[0355] The numeration of the bacteraemia at 18 h was obtained by taking of 5 μl otf blood after incision of the tail.

[0356] Bacteraemia at H18 (%) of 4 days old rats after intra peritoneal injection of various strains of E. coli.

| | | INOCULUM | | |
|---|---|---|---|---|
| GROUP | STRAIN | 100 bacteria | 10000 bacteria | 1000000 bacteria |
| B2 | C5 | 100% | ND* | ND* |
| B2 | CFT073 | 0% | 0% | all dead 100% |
| A | S82 | 0% | 0% | 66% |
| D | S16 | 25% | 64% | ND* |

*ND not done

[0357] 2. Mortality of adult mice (%) at D7 after intra peritoneal injection of 3 strains of E. coli. The inoculum was prepared as above-mentioned and the injection made by the intra peritoneal route.

| | | INOCULUM | | |
|---|---|---|---|---|
| | | | | 10⁶ to 10³ |
| GROUP | STRAIN | 10⁸ bacteria | 10⁷ bacteria | bacteria |
| B2 | C5 | 100% | 100% | 0% |
| B2 | CFT073 | 100% | 0% | 0% |
| A | ECOR4 | 0% | 0% | 0% |

[0358] It appears from said results that the E. coli B2 responsible for neonatal infection (C5 strain) are capable inducing a bacteraemia after injection of a weak inoculum in the newborn rat and that the mortality in mice is 10 times higher. With CFT073, i.e. the E. coli B2 responsible for sepsis in the adult, it is necessary to use a stronger inoculum. But said coli is still pathogenic in mice. An E. coli of group A is not pathogenic even in mice.

[0359] With the claimed sequences, it is then possible to generate mutants whose virulence can be tested on said animal models.

1. A library of DNA fragments of E. coli strains consisting polynucleotides having a nature B2/D⁺ A⁻.

2. The library according to claim 1, selected from the group comprising the E. coli C5⁺ A⁻ library, the E. coli CFT073+ K12− library, the E. coli RS218+ K12− library, or the E. coli CFT073+ K12− and RS218+ K12− library.

3. The library according to claim 1 or 2, which is devoid of 0157:H7− polynucleotides.

4. A method for isolating from E.coli strain(s) the entire set of the chromosomal and plasmid polynucleotides having a nature B2/D⁺ A⁻, comprising subtracting the polynucleotide population of one or more E. coli strain(s) of group A, randomly sheared, from the polynucleotide population of one or more E. coli strain(s) of group B2 or D, cleaved with a restriction endonuclease allowing fragments comprising from 100 to 1500 bp approximately, with a mean of 300 to 500 bp approximately, to be produced, said subtraction being iteratively repeated, if desired.

5. The method of claim 4, wherein the E.coli strain submitted to said substraction is an E.coli C5 strain or an E. coli RS218 stain, and the E.coli strains of group A are of the ECOR collection.

6. Isolated polynucleotides having a nature B2/D⁺ A⁻, with a sequence selected from the group comprising:
the sequences SEQ ID N^{o}1 to 153,
the polynucleotide sequences obtainable by digesting the total DNA of an E. coli of group B2 or group D with a restriction enzyme, selecting those of the obtained fragments which hybridize with at least one sequence selected in the group consisting of SEQ ID N^{o} 134, 144, 109, 115, 140, 135, 33, 56, 122, 130, 141, 25, 48, 51, 57, 121,44, 45, 113, 119, 120, 23, 52, and
the sequences of the orfs containing one of said sequences,
the nature-conserving variant or fractional sequences of said sequences.

7. The polynucleotides of claim 6, the transcription of which is increased in the presence of human or animal serum and the genes bearing such polynucleotides.

8. Pair of primers allowing the amplification of a polynucleotide according to claim 6 or 7.

9. Pair of primers according to claim 8, corresponding to SEQ ID N^{o} 164 and 165.

10. Probes which are elaborated from a polynucleotide according to claim 6 or 7.

11. The use as a probe of a polynucleotide according to claim 6 or 7, such as obtained by amplification with a pair of primers selected from the group comprising SEQ ID N^{o} 160;161; SEQ ID N^{o}162,163; SEQ ID N^{o}164,165.

12. The polynucleotides having a sequence corresponding to the antisens of the polynucleotides according to claim 6 or 7.

13. A combination of a polypeptide encoded by a polynucleotide according to claim 6 or 7 with a ligand which is capable of inhibiting a biological function of E. coli, such as the extra-intestinal growth, said ligand being selected from the group comprising serum, purified serum, antibodies and monoclonal antibodies.

14. Vector comprising at least a polynucleotide according to claim 6, 7 or 11 and cells tranfected by such a vector.

15. The method for the phylogenic determination of an E.coli strain comprising the use of at least a polynucleotide isolated from the library according to anyone of claims 1 to 3.

16. The method of claim 15 wherein said polynucleotide is selected from the group comprising: a polynucleotide according to claim 6 or 7, or a polynucleotide selected from the group comprising:
the polynucleotides corresponding to the chuA gene and to its operon,
the polynucleotides the sequence of which corresponds to SEQ ID NO: 170, 171, 174, 175, 178, 179, 183, 185, 186, 190, 191, 193, 194, 195, 196, 199, 200, 202, 205, 206, 208, 209, 211, 214, 218, 220, 221, 233, 234, 235, 241, 244, 246, 247, 248 and 250,
the polynucleotides which can be obtained by digesting the total DNA of an E. coli of group B2 or D with a restriction enzyme chosen from the group consisting of NotI and BlnI, and selecting those of the fragments obtained which hybridize to at least one sequence chosen from the group consisting of SEQ ID NO: 125, 123, 116, 43, 40, 127, 133, 27, 34, 36, 42, 46, 54, 55, 38, 128 and 151, with the exception of the polynucleotides sfa, hly, cnf1, pap/prs, hra and ibe 10,
the polynucleotides the sequence of which corresponds to an orf comprising the sequence of one of the polynucleotides cited in the preceding three paragraphs,
the polynucleotides the sequence of which corresponds to a nature-conserving variant or fractional sequence of the sequence of at least one of these polynucleotides (and in particular SEQ ID NO: 241, 195, 185 and 248),
the pair of primers, the probes and the antisense polynucleotides, the sequence of which is as derived from these polynucleotides,
the binding products which are capable of binding to a polypeptide encoded by a polynucleotide which is of nature B2/D+ A−,

17. The method of claim 15 or 16, comprising the detection of yjaA.

18. The method of claim 17, wherein yjaA is detected with a probe, a pair of primers such as SEQ ID N^{o}162, 163, or the encoded protein is detected by a specific antibody.

19. A pharmaceutical composition, comprising an effective amount of a polynucleotide of the library of anyone of claims 1 to 3, or the encoded proteins in association with an inert carrier.

20. The pharmaceutical composition of claim 19, wherein said polynucleotide is according to claim 6 or 7, a vector or a cell according to claim 14 or an antisens according to claim 12.

21. The pharmaceutical composition of claim 20, wherein said polynucleotide(s) is (are) selected in the group comprising polynucleotides of SEQ ID NO: 71, 114, 13, 77, 8, 36, 120 and 130.

22. The pharmaceutical composition of anyone of claims 19 to 21, for treating and/or palliating and/or preventing extra-intestinal E.coli infections.

23. The use for making drugs for preventing or treating, E. coli extra-intestinal infections of at least one polynucleotide selected from the group comprising:
the polynucleotides corresponding to the chuA gene and to its operon,
the polynucleotides the sequence of which corresponds to SEQ ID NO: 170, 171, 174, 175, 178, 179, 183, 185, 186, 190, 191, 193, 194, 195, 196, 199, 200, 202, 205, 206, 208, 209, 211, 214, 218, 220, 221, 233, 234, 235, 241, 244, 246, 247, 248 and 250,
the polynucleotides which can be obtained by digesting the total DNA of an E. coli of group B2 or D with a restriction enzyme chosen from the group consisting of NotI and BlnI, and selecting those of the fragments obtained which hybridize to at least one sequence chosen from the group consisting of SEQ ID NO: 125, 123, 116, 43, 40, 127, 133, 27, 34, 36, 42, 46, 54, 55, 38, 128 and 151, with the exception of the polynucleotides sfa, hly, cnf1, pap/prs, hra and ibe 10,
the polynucleotides the sequence of which corresponds to an orf comprising the sequence of one of the polynucleotides cited in the preceding three paragraphs,
the polynucleotides the sequence of which corresponds to a nature-conserving variant or fractional sequence of the sequence of at least one of these polynucleotides (and in particular SEQ ID NO: 241, 195, 185 and 248),
the pair of primers, the probes and the antisense polynucleotides, the sequence of which is as derived from these polynucleotides,
the peptides encoded by said polynucleotides,
the binding products which are capable of binding to a polypeptide encoded by a polynucleotide which is of novel nature B2/D+ A−.

24. The use according to claim 23, wherein said polynucleotide(s) is (are) selected in the group comprising the polynucleotides pf SEQ ID NO 174, 202, 178, 221, 206, 175, 196, 170.

25. The pharmaceutical composition of anyone of claims 19 to 22 or the drug obtained according to claim 23 or 24, for treating septicaemia, pyelonephritis, and meningeal infections in newborns.

26. Use of the polynucleotides of the library of anyone of claims 1 to 3, or antisens thereof for the diagnostic of the presence or the absence of undesired E.coli such as contaminants E.coli or extra-intestinal E.coli. in a sample.

27. The use according to claim 26, wherein said DNA polynucleotide is according to claim 6 or 7, or is in a vector or a cell according to claim 14.

28. The use according to claim 27, wherein said polynucleotide is selected from the group comprising:
the polynucleotides corresponding to the chuA gene and to its operon,
the polynucleotides the sequence of which corresponds to SEQ ID NO: 170, 171, 174, 175, 178, 179, 183, 185, 186, 190, 191, 193, 194, 195, 196, 199, 200, 202, 205, 206, 208, 209, 211, 214, 218, 220, 221, 233, 234, 235, 241, 244, 246, 247, 248 and 250,
the polynucleotides which can be obtained by digesting the total DNA of an E. coli of group B2 or D with a restriction enzyme chosen from the group consisting of NotI and BlnI, and selecting those of the fragments obtained which hybridize to at least one sequence chosen from the group consisting of SEQ ID NO: 125, 123, 116, 43, 40, 127, 133, 27, 34, 36, 42, 46, 54, 55, 38, 128 and 151, with the exception of the polynucleotides sfa, hly, cnf1, pap/prs, hra and ibe 10,
the polynucleotides the sequence of which corresponds to an orf comprising the sequence of one of the polynucleotides cited in the preceding three paragraphs,
the polynucleotides the sequence of which corresponds to a nature-conserving variant or fractional sequence of the sequence of at least one of these polynucleotides (and in particular SEQ ID NO: 241, 195, 185 and 248),
the pair of primers, the probes and the antisense polynucleotides, the sequence of which is as derived from these polynucleotides,
the binding products which are capable of binding to a polypeptide encoded by a polynucleotide which is of novel nature B2/D+ A−.

29. A method for identifying a compound capable of inhibiting the extra-intestinal growth of E. coli, which comprises the detection of at least one compound:
i. capable of binding to at least one polynucleotide chosen from the group consisting of:
novel polynucleotides which are of novel nature B2/D+ A−, i.e.
the sequences SEQ ID NO: 1 to NO: 153,
the polynucleotide sequences which can be obtained by digesting the total DNA of an E. coli of group B2 or group D (such as, for example, an E. coli strain isolated from the blood of a patient suffering from a septicaemic or meningeal infection) with a restriction enzyme chosen from the group consisting of NotI and BlnI, selecting those of the fragments obtained which hybridize with at least one sequence chosen from the group consisting of SEQ ID NO: 134, 144, 109, 115, 140, 135, 33, 56, 122, 130, 141, 25, 48, 51, 57, 121, 44, 45, 113, 119, 120, 23, 52 and sequencing selected fragments, and
the sequences of the orfs (open reading frames) which contain one of these sequences,
the nature-conserving variant or fractional sequences of these sequences,
the polynucleotides corresponding to the chuA gene and to its operon,
the polynucleotides the sequence of which corresponds to SEQ ID NO: 170, 171, 174, 175, 178, 179, 183, 185, 186, 190, 191, 193, 194, 195, 196, 199, 200, 202, 205, 206, 208, 209, 211, 214, 218, 220, 221, 233, 234, 235, 241, 244, 246, 247, 248 and 250,
the polynucleotides which are as obtained by digesting the total DNA of an E. coli of group B2 or D with a restriction enzyme chosen from the group consisting of NotI and BlnI, and selecting those of the fragments obtained which hybridize to at least one sequence chosen from the group consisting of SEQ ID NO: 125, 123, 116, 43, 40, 127, 133, 27, 34, 36, 42, 46, 54, 55, 38, 128 and 151, with the exception of the polynucleotides sfa, hly, cnf1, pap/prs, hra and ibe 10,
the polynucleotides the sequence of which corresponds to an orf comprising the sequence of one of the polynucleotides cited in the preceding four paragraphs,
the polynucleotides the sequence of which corresponds to a nature-conserving variant or fractional sequence of the sequence of at least one of these polynucleotides and in particular (SEQ ID NO: 241, 195, 185 and 248), and
ii. capable of specifically inhibiting the correct transcription and/or translation of this polynucleotide.

30. A method for identifying a compound capable of inhibiting the extra-intestinal growth of E. coli, which comprises the detection of at least one compound capable of inhibiting the activity of a protein the orf of which comprises a polynucleotide such as used in the method of claim 29.

31. Kits for implementing a method according to anyone of claims 15 to 18, or the use according to claims 26 to 28 comprising at least a polynucleotide of the library according to anyone of claims 1 to 3.

32. The kits of claim 31, comprising at least one of the pairs of primers (SEQ ID NO: 160, 161), (SEQ ID NO: 162, 163) and (SEQ ID NO: 164, 165).

33. A vaccinal composition for preventing, alleviating or combatting an extra-intestinal development of E. coli, comprising an immunogenic polynucleotide such as isolated from the library according to anyone of claims 1 to 3 or an inactivated isogenic mutant thereof as active principle, or the corresponding ORFS in association with an inert carrier.

34. The vaccinal composition of claim 33, wherein said polynucleotide is polynucleotide selected from the group comprising:
the novel polynucleotides which are of novel nature B2/D+ A− according to the invention, i.e.
the sequences SEQ ID NO: 1 to NO: 153,
the polynucleotide sequences which can be obtained by digesting the total DNA of an E. coli of group B2 or group D (such as, for example, an E. coli strain isolated from the blood of a patient suffering from a septicaemic or meningeal infection) with a restriction enzyme chosen from the group consisting of NotI and BlnI, selecting those of the fragments obtained which hybridize with at least one sequence chosen from the group consisting of SEQ ID NO: 134, 144, 109, 115, 140, 135, 33, 56, 122, 130, 141, 25, 48, 51, 57, 121, 44, 45, 113, 119, 120, 23, 52 and sequencing selected fragments, and
the sequences of the orfs (open reading frames) which contain one of these sequences,
the nature-conserving variant or fractional sequences of these sequences.
the polynucleotides corresponding to the chuA gene and to its operon,
the polynucleotides the sequence of which corresponds to SEQ ID NO: 170, 171, 174, 175, 178, 179, 183, 185, 186, 190, 191, 193, 194, 195, 196, 199, 200, 202, 205, 206, 208, 209, 211, 214, 218, 220, 221, 233, 234, 235, 241, 244, 246, 247, 248 and 250,
the polynucleotides which are as obtained by digesting the total DNA of an E. coli of group B2 or D with a restriction enzyme chosen from the group consisting of NotI and BlnI, and selecting those of the fragments obtained which hybridize to at least one sequence chosen from the group consisting of SEQ ID NO: 125, 123, 116, 43, 40, 127, 133, 27, 34, 36, 42, 46, 54, 55, 38, 128 and 151, with the exception of the polynucleotides sfa, hly, cnf1, pap/prs, hra and ibe 10,
the polynucleotides the sequence of which corresponds to an orf (open reading frame) comprising the sequence of one of these polynucleotides,
the polynucleotides the sequence of which corresponds to a nature-conserving variant or fractional sequence of the sequence of at least one of these polynucleotides.

35. The vaccinal composition of claim 34, wherein said polynucleotide is selected from the group comprising SEQ ID NO 71, 114, 13, 77, 8, 36, 120, 130, 174, 202, 178, 221, 206, 175, 196, 170.

The application's sequence listing, which the Patent Office published only in electronic form, follows.

SEQUENCE LISTING (1576 sequences)

SEQ ID NO: 1 - DNA, 309 bp, Escherichia coli
ttagaatatcggggaatatctgcaaatatcttctctttatatgtgtcaactatcgaaaaaaattgaaatgtcttcttctgagttcttattctctgtttcctgattgttccaacacctgatgttttatctatttgtttttaatgaggtaattcaggtgtcatgccaaatgacgacattttttgttgcgtcgcttaaaaactcgtgacacgattttaaacactaacgagcttctacgaaccttagcgaacaaagcctttagcatggttgtgtttttaatttaataggtgaaaaagaatctaagtaatatcc

SEQ ID NO: 2 - DNA, 141 bp, Escherichia coli
gctgtcctgtcggcgttgattcagcagggcctcagcctgttcaacttcacgacgcagtttttcagaacgggtaccgaacagcatccggcgcagtttttctatctgggccctcagatgttctgtttcccgctcctcctcttc

SEQ ID NO: 3 - DNA, 186 bp, Escherichia coli
aaaaacaacaaattaataacaaataatgtgagggataagaattgggttgaaaggaaatgaataattaaaacaatatattaagtgtgcttatactctttttcgaactggtggcatttgtttaaatgctatttaaactgctttttcagagttcaacttactgagttccgtgtcgactaatgtgagtaa

SEQ ID NO: 4 - DNA, 192 bp, Escherichia coli
gtatcacgtaagagtgtcgcagcattaatcacagatatcatcgataaacctgagaaacacattggtgagaatataggcatcaatcaacccgggactgatggtgataagcccttcttcatgtaaatcaattatatagctaccatcgtactgtactatgtgcagtacgatttattaaacttattaaggtgaact

SEQ ID NO: 5 - DNA, 126 bp, Escherichia coli
aggaaatgacgttttactcagctatgaacaactgacccggtttgcggaaaaacgcatccgggaatgcaatctggacagccacggcgtaacttatctctgcgagtcagccaaagccggagccgtgct

SEQ ID NO: 6 - DNA, 125 bp, Escherichia coli
gtacaaattaccgaatgtcagaaactcgtcgctgcgccaggcaaggccaacaaacagcaccacaatcagtaatgccagccagaattcagggcgttttttcagttcagccatttaccacctccgca

SEQ ID NO: 7 - DNA, 125 bp, Escherichia coli
ctgaagtggtgtgcatgcgctgttgtccggcacatgtttatctgccgaatgttccttgttgtctaataatgctgatttttttatgccaagactgacaagaaggtctgtactcaggcatgggatga

SEQ ID NO: 8 - DNA, 174 bp, Escherichia coli
gtactttagctatacgaaatattccaggatttggcaacgtagcgaatatcgtaacaaagctggttaatcatgggttggttgatatcgtaaatggtgagggcaactctaaaccacgctacagagtttctcaatatggattgaatcttatcaaagaacaacaagacaacctcttct

SEQ ID NO: 9 - DNA, 198 bp, Escherichia coli
cccattgcttcattctgatatatcagaataattttttcattttaagacgcacatcattcattgcctcctgcaccgaatcagtagcagaaggaggcattttttcaacagattgcgaagcaccgagttcagtcaacacagttctgatatcggcctgagaaggcttccatccagtcgtctgactgagtaaggttacaacct

SEQ ID NO: 10 - DNA, 179 bp, Escherichia coli
aagggttaggtcgatatagtccctggcagggtcggcaatgacgtggccgtatctgccaggaccattatcccactgcataccgacaatacaggagtacaggttgctgccgtcttccgtcagataatcagtcagcgtctggctggtcagctcgctgcaaccggccgggaaatccttcaggt

SEQ ID NO: 11 - DNA, 144 bp, Escherichia coli
tggctgactggcctgttgttgtttcgcctgctcaaccatctgctgttcttctggcgttcttggcttgataactccagacagaagcaactgattgcggttgtattctttaaggtcgtccatcccttcgccgtccatattgtcgag

SEQ ID NO: 12 - DNA, 148 bp, Escherichia coli
accaaccacaaaaaacgccttttttaatgacggtggcaatcttagcgtaagacattccaccagcggcctgttaacctggtatttcacttacagggccggaactggtaggcaggtatcaccggaacgtctgagactgggcaattatccc

SEQ ID NO: 13 - DNA, 156 bp, Escherichia coli
cctgggttgcatcaacacgccgtgtcagtgttcctgtcgttgcatcatacgcggtaacacgcgcctgattatcgctgtatttatcctggctgtagctgtaatcaaagcgcgctgtccactggctattgagatgatattctgcgttgagttgcgcca

SEQ ID NO: 14 - DNA, 110 bp, Escherichia coli
atcgaatacatctctgataaattctaaaatggcagttccagttatattggttttagagcgacttaaacgtcttgtcaatggtgtaaaggtttttaaataaccatctaagt

SEQ ID NO: 15 - DNA, 248 bp, Escherichia coli
aaattccccaaataaatagtgccgacatgttgaataatccatatttaacctttggcgtgacttataatggtgtagattatgaagggataaatgaaagaattgatactcatgcatgcctggataaatatgagcaatactataatgggtattattatgaccctgtatgcaatggcagtacccttcaaaaaaatgtaacatttaatgcccattttcgcgtctatgtaaaattcaaaagccgcccagcagga

SEQ ID NO: 16 - DNA, 286 bp, Escherichia coli
acgaacactcatctccgttcctttggcgtatccgtccattgatttatctgaagtaatttctggtgggattgtgttgaggtaactaattaatttactaaaatttttatcaatagctaaaagcagttcagcttttgtttgcggcacactcataagaattccctctcatgtaaaaagagacaccataaaggtactgtgtggtgtttgaaaatcactcaattatgtaccacccaccacaacaggggaagacccatatacatacagcaaaagaaaagggagatgagaacat

SEQ ID NO: 17 - DNA, 293 bp, Escherichia coli
ctgaaatccttatgaaacaaagtatagtgagtgaaatcataaaaccgactgactggttaactggtctgatttgtttcagtcagttttcgttaaaattctccatgttataaatttaataacctgaaaattattaccacgctaattaaatgtatttctttttgttatttttttctggagttttatactgatttaagtaatatatttcaaataaactcgtttttactatgtcttatggtgtaatgcgctaacctgtttcgctacggtaatagatatacccaccatattgaacattt

SEQ ID NO: 18 - DNA, 160 bp, Escherichia coli
ggatggttagttctacggtccttcagcacaatcgtcgagtttgtatcatcaaacgagagggcaatattatcgttattgaacgtatagtttgctgctactgcactatgagacacacacagagccagtagtgagagagtgagcactttcttcattggtgtaa

SEQ ID NO: 19 - DNA, 382 bp, Escherichia coli
ttgcgcactctgctgtcagtactaatactcctcaagaaggttcgccgctgagcctcgtacttaatattcttaacaggtttccgacctttgttcgccagttaaagaggcggtacaacggccgtgcgccgcttgaagttaatgatgagtatgacgtacaggatttgatttatgcactgctgacgcttcattttaatgatattagggcggaagagtatacccccagctttgcgggcgcggcctcaagacaggactttcttttgaaaaaagagaaaattgtgatagaggtgaagaaaacccgtgaatctctgggagcgggtaaagttggtggagagttgcttattgatatggcgcgctaccgcgctcaccaagactgcgatacgtt

SEQ ID NO: 20 - DNA, 123 bp, Escherichia coli
tgatgtcctatgttgctaaataccatagcctaaatcatccgccataatgatgactaaattgggttgtttagtctcggcagctacgactggattaaaagcattccctgtgcaaactgcaaggtc

SEQ ID NO: 21 - DNA, 155 bp, Escherichia coli
tgttccagcggtaactcgccgctgaaactgaacgtcagcatttcatataaggaaggtgtcgacatcggttatttatccttgagaggcagcagtcgcaggtcgcttctcatcagttcaatcgagcgcggcttgtcggcctccagttcgtccctttt

SEQ ID NO: 22 - DNA, 114 bp, Escherichia coli
gccgcctgcattcagatgcagcttacccatcatggccgtgtcatacccttgcgctttgagtagattagcaatcgtgagttcattacgccctaatgccacatcttttcccgttgg

SEQ ID NO: 23 - DNA, 224 bp, Escherichia coli
catttcagtaagttcattcttgaaggggaatgtactggtaatgtcaccaaaggtaatcgtgcctgcatttatatcagcacgtaaactgccggagtttatcaacgcaatttgtgcagtcggtgcagcgacaagcattgcatcggtaaacaggttgccaagttgcgatgactcaccgtaggcacgagttaatgcaatcgatgattcaccgactggttggcgtacaa

SEQ ID NO: 24 - DNA, 143 bp, Escherichia coli
atacatgatgaagattttttatccgaatccataaaaatagtgacagctaaccggcgttgcaggaacagtcagaaatgggcgtttgggaaagagccatagcactacgtcgtcgctgacatagaggaactgtgctttgttgataa

SEQ ID NO: 25 - DNA, 163 bp, Escherichia coli
aggaaaacgccgccaccgggctgaaagttgccatgatggatgcgaacggtgaggtcggaaagcgctttcaggacatcaataaactggctattggtctgggtaaccagctacccggtacaacggctgatttccagaacatgatgcagatgctggtgcgtcaggg

SEQ ID NO: 26 - DNA, 101 bp, Escherichia coli
cttgtttttgccagttatctctatgtcacgttacgcaatctgtttttgaataatctgacgctggcaaatgggacaattcgttttcattcatctgttaccgc

SEQ ID NO: 27 - DNA, 203 bp, Escherichia coli
ctgaatgcgtactgaccggaaaccataccaggcaacaaatttctgttcgccagtaagttatcctgccggtgctgcatattctcctcgtggggtatccagtgtaaattaacgtaagcggaatgtcagtgctgaaatttacaccagataaaaaacatacagaaacaatcctgttatgtaaaatccggggaaaatatcagaaatgt

SEQ ID NO: 28 - DNA, 236 bp, Escherichia coli
aaatttaggtccgcctacactccgtaaagactctgtcagttcacaggtattacctagtgaagacgtatcataaaatgaaaactgtagttgggtagttgctccccctcacggcatgcaggggctgagggggaaaatttccttatcttgttgttgctatttctggcttagtcagttttgaattttgcttcctaagcaataatcccctcaccgcaacaatcgttcttctacactaataa

SEQ ID NO: 29 - DNA, 308 bp, Escherichia coli
gggcaaaaacatggggactggaaataagcgcggaatataatggctgggttttctcgccatatatcagtggcaatttaattcgtcggcaatatgaaacttcaacattaaaaacaactaatacaggagaaccagcgataaacggacgtatagggctgaaacatactcttgtgatgggtcaggccaacataatctctgatgtttttattcatgctgcctctagtgcaaaagatgacagtaacggtaccgaaacaaatgttccgggctgggccactctcaactttgcagtaaatacagaattcggtaacgag

SEQ ID NO: 30 - DNA, 160 bp, Escherichia coli
aacaacaggttgctgccgcgcagctcatcgcacttttgcgtggcgacgacatgtccggttacctttgcgagaatcatcgtttttatcgccttatctcaatgaattacttgcctaagcgctcaagcacctggcggatgactcgctcaacgttctgctcgtt

SEQ ID NO: 31 - DNA, 574 bp, Escherichia coli
gttttagataacaaatcatgttcttcatttctacgttgctttgtctcaacaaataattcagacatatcgccatcgtccttaaagaaatctcttgcgatttcgatgaagaaattttcaagcatttctttaaactgtttatatggcttattttcaatgaatccttctcgcccagctttttcaactaatgaagcattgttttcttttgttaattctattgctccaaacaaacgtcgatatgagaaaaaatattcagaagcggataacgttcttctcttttctatttttagaaaatccgtatctgaatctccatagggcaaaattcttaatccatctcgatagatatataaaccaccatatctatctgttttctccttcagaggggcccacaactccatgggtaagcgtgaatcacgaagccgaccatgaatatacgctaattttattttaaatggaccgcattgggttaattgattattatttttccaagtcacgacatgatgaattggctcttcaccataaacagaaacagttccactgaattgaccaaattcattgaaccatccttcaatgtggt

SEQ ID NO: 32 - DNA, 142 bp, Escherichia coli
agtttttgccagatagctgaaacgtattttgcctggtaacgggcgtcatcaagtgcattatggcgctcaccttcgaatggaatagccgttctggcatcgaagtctatggctttccccagctcaacgattgtgcgtacatcgc

SEQ ID NO: 33 - DNA, 182 bp, Escherichia coli
cctgcccggctgcataccggtgatatctgcgtggccgtcaacaaaaatccggcagtggcctcatttcgtaatgtcacgcgcccgacactgccgctctggccagtcacggacggcgacatgcactggtcgctgatttccgcgatgaacctgaactacctctccctgctggacagggagacact

SEQ ID NO: 34 - DNA, 197 bp, Escherichia coli
gctctcgaacacaatattaaacagcctcaaatcctgcattttaagtttcacgcctacctccttttttcacagtgtaacgggatgaaagtgggggaggaaatgagtcagaacctgtacaccagcattaggggattccgcgtctggtacaaagcagactatgagaagagagacgctataacatttgagtcctaccaatc

SEQ ID NO: 35 - DNA, 359 bp, Escherichia coli
gagtcgtagaatcgctttactataaacttaatccgatttttcacctgtttttcttagtagaaacatgaataatggtgaataatcaagcccatagtttattttacctgacataggtaaaatgtatggatgctcagaattaactcttttattcttactccgcccccaatgatattctccaccatgtaagtgtgggacattataattaattaaatttacagggcaatatcagctttttcacacttgtttttcctgtaattgctcataactatttatctacacttatgttaattttttattcgttagacttgggtatttgatatttcaggtcgatttcaggtgcatcaactagttgcctaccg

SEQ ID NO: 36 - DNA, 288 bp, Escherichia coli
ttcgaatttcttcatcatcaattcagatataacaatcttattcaaaccatcagaaccggtaagcaagttaatgatgaccgctaaaacaccacttgccagaatagcgccaaaagcactttttattttgtttgccgcactttgtaatgtgacatccatcattcctgttcccgtcaggacgccagcaaacatcatggcgcagataataaatgacaggaatccgccctgattattcaggccgccttgttcaagcagttctttcacagaaggtaacagcgtcgttgaatcagt

SEQ ID NO: 37 - DNA, 207 bp, Escherichia coli
tgatataaccccatcatgatggcctttcaaagcgatttttcactctttgcatggggggaaatagcgctttctcttgcacatttgtctctctgcgtagtagtcatcagcacaggtgtgcagcgatgcgtaatttgttgattattcttattttgccaggcaaatttgcatcgtacttccggggacacttttgtgataaaaggcgtggca

SEQ ID NO: 38 - DNA, 326 bp, Escherichia coli
cgggaaaatgccacctgattgccaccagacaatttcttcttcagaaagaaaacagttaattaaggcggaggtaaaatcatggacttcatcagaacgtcctataatcgttacatctcctgtctccaaaccgccccagagtttctgcaaagcagagcgctcttcgtgggtcaggtgattatcaggggctgccaatacaccggaattccagtagctgataaactccagattgatgcttcctgcggcccggttccagagcagagccatgtcaggtcttcctggtagccagaaaaagtctttattacgataattacgtagcgttcagtgat

SEQ ID NO: 39 - DNA, 316 bp, Escherichia coli
ctctaaccggtaaagctgcaacgtcagccagaatgtctcaggctaagagatggcttgatggcaacaataattacaacaatgcgttgattactggtgagcgagggatagagaaaatagattctttgcttggtaagaaggagcttgaaggtatcggtcgcttcgaaggaagaaatatagatggcttcacaagtgctgaagggcttgcaaaccgtaatgcgatagaagaattaaagtcgggtgcgtttgtccagaacgtgcagattatgcgaggtatggggagcctctccaatgctgaaggccaaaaactggaaaacct

SEQ ID NO: 40 - DNA, 234 bp, Escherichia coli
actgttgagcacatcatattccaaaccccatttgccccgactcatcttcaagcggtaaaggtattctcccagagtaagttatgttcagatgtttacagaagtaattccaataccctaccaggtcatctgggtttatgtcatcttcgattggaaacgctattctatcactatagtatccagcttcttcatagtatacatggtagtgagcaccgtaaatgatatcttggtacttcg

SEQ ID NO: 41 - DNA, 104 bp, Escherichia coli
ccgaaaagttggccacagtttgaagcgttctacttctttatttcgcattgtgtcttcgtttgagtttttcaggcaaggcgaaatgagagcctctaagctggaaa

SEQ ID NO: 42 - DNA, 225 bp, Escherichia coli
ctgaaagcatcgataatattcgcggtgccctgcattatctggcgaaagaagagcaaaaagacgggctgtgtgcttacggctgcaatgaagttcctgaacgtcctgctgcagggcgtcctcgtaagcctcacttctgaagcttaaggcctgagccttcgctcctggaaacactccgtcggtaaaaacttaccgccttgattaatgatgtgaactgaagtcaacgga

SEQ ID NO: 43 - DNA, 125 bp, Escherichia coli
gaccttgtaactattcgtgtgtttgtcaaagcgataggtatctaccgcgaaaaccctcttgttatgatagaaagcaataatatttattttagggtaagaaatcgggtcatcaggttctgaatcct

SEQ ID NO: 44 - DNA, 221 bp, Escherichia coli
atctgtaaggtggccccaacagataaagcagttggcatatcattaaagatgagtcccataataggtgctatcgataatggcatacgcataatagaaaagccgtaccatacttttgcttgggatatccaatataccagggcaatcattgctgctgtaaaaatagacataagctcctctccttaattaaggtaacttatttttgattttttgtaggctggcag

SEQ ID NO: 45 - DNA, 186 bp, Escherichia coli
ttcttcaggaatagtttggaaataaactttgatattcttatcttcgatgatttgaagtttgtcggcatcttcgtggttgagtgatatttggttaaagacaatttttcttcccggagtattttcaacaccaccgacttgtaattcctctaacatcaaaccaccttgtatagtttttaatgcagaatc

SEQ ID NO: 46 - DNA, 273 bp, Escherichia coli
attcatcctgaacctgcatccggtgttttgttccttgtcttcccgttctgctccggttcttcacttattccatcaatctcatccgcaagccataacacgtcagctcattcacgggcaggacgcattgtgggctgcgcataacggaacatatcttatgaatgctattccttatttcgactatagcctggcacccttccggccatcttatcagaacaaagtcatcggcgtccttgagcgtgcgctgcgtgagcagtccggctcacggatacggcg

SEQ ID NO: 47 - DNA, 140 bp, Escherichia coli
aacctgtttgagcaagcatctaactcgtttggcttttgacgtcccctctttctgatgacgttcatcatcaatatcaatgttcaattcttcatcgaaaaaagcagacaaggtgcggttagagaaatccagtatccagccag

SEQ ID NO: 48 - DNA, 203 bp, Escherichia coli
tgcccattccagtatctgatgcctgcgcgctaaagagagcgccacacccagcggactttggtgtgctggtgttatcagggcaaaacgcgcatcaggataattttgtattccgcttgtgatatccagtccattgtcatcaaccggcacaggcaaaatttccacatcatggcgagtgacaatcgggcgaatcagtggaaagccgg

SEQ ID NO: 49 - DNA, 133 bp, Escherichia coli
gatttgaaaagaattagtaatttaccttcatagaaactattgctgttccagcgttgtaacgtatcttcaatggaggtcattatgacttcaacaccacttggcgctgccaccttatagacttcagccaggaaag

SEQ ID NO: 50 - DNA, 318 bp, Escherichia coli
gtcgactatgatggcaatatagtgcatcaaccgtccgctgcggcattgttaccggaacggctagaaaaagtttgccagtggttaaacagccatgaagggtatattcatccgttggtccgtgcctgcattctgcattttatgctggcccatgaacatccatttcgcgatggcaacgggcgcaccagtcgggcgctgttttactggtatatgctgaaatcgggctacgatgtctttaaatatatttccatcagcagtttgcttcatgctgcaccggtcaaatatgccgccagctaccagtacactgaatcagatggtatg

SEQ ID NO: 51 - DNA, 271 bp, Escherichia coli
gcggctggggagaggttgcaaatgctagctacggttcctttctcgatgtattacaaacagcattgtaccgggacaaacctacaaagaaaggtgagacgttaagtgcgacctaccagcaactactcgatgtacctttgggtttggagtatggtcctgactcacttgatgaagagtatcttgaagtcataaggttgtatcaatttccggtccatgtcgttggctataactggcttggttctaatatgctctcagcaatcagactacaagaaca

SEQ ID NO: 52 - DNA, 300 bp, Escherichia coli
agtaatgggcaatctctcttcgccggtcccaacattcaggtagccagactctggcagcatcagggagattcagatacgtttgcgcacacaacagagtgatgaatgttcccgcgtctaaatacagatttaccgcatgtttaaaagcgctatgtagacgtaaatcttgcgtttcattctgcgggaaaagatatcccaacgacgatgcgcaaagcgtaacctgtaccatcggcgttagccttccagacctgcaataatggctttggaatcagtaacccaaccgaaaatggcaccttgtgcttt

SEQ ID NO: 53 - DNA, 167 bp, Escherichia coli
gttctgcttgttatagcaggcaagtaaccactctagggcattatggcgacattcctgaaattgtgcgtactgagcaatattctctgctaagtcgattgcatattgttgctcctcgggcgcaatgtcctcaatgctgacatctcggtaatcatcccaccaaagtaaga

SEQ ID NO: 54 - DNA, 203 bp, Escherichia coli
agcaggtggataatgcggtcccgggctttacgcagaagctgtaacatccaggccggaaaactgaaccgggcaacggcgtcgtcaaaacttttcccgatggcatcaccaaaagtctgttgtgcgtgtttccgggcctgttcagagcggttttccccccggatatgtgaataaactgcgctggttgcctgtggtggcagcgcgtg

SEQ ID NO: 55 - DNA, 229 bp, Escherichia coli
gtggcattaatcagcagaatccacatcagggcgaagtgccacagtaacgcaccgccaagccagccaccgagagttaatgctgccggatagttaaaagaaaacaaaggagaagcattataaatgcgccatccactacatatcatgcctgcgacagtaacagcattaatccagtggcaacagcgtaaccacagaggatgtatttgttttaacggtaatggctgcattatgt

SEQ ID NO: 56 - DNA, 195 bp, Escherichia coli
atgtatgttgccccccatatacagctgaatgccgtctgagccgtgataaaagaatgatgtcgggagtattcctcctgtcagataaccatacccacctgttacccaatgtcgcttaccctgactatcctgaatatactgacttcccgaaccagccctgtagaatgccgagtattttgaagggttcaatatatcagc

SEQ ID NO: 57 - DNA, 259 bp, Escherichia coli
cagtttttatatttaccagaatcaacataggtttccatagtgtgagtgagaacgttctgcgcagtatattttgtggaaatgagcgcatcgtaatctttctcaagcgccctaaatctttcttccagttgtagatttgtcatagtgccttccaggctgtatagtcggataacaaggtctgtgcgtatggaaattctaccatacttagccttcttttcttcacactgggcgtaacagccattctgtccagcccccctagcgt

SEQ ID NO: 58 - DNA, 109 bp, Escherichia coli
caccaccatgccaaaatagagttcctggcgtaccggatagatgttttcgcacagcaaaatactgctgacatgctgcccttctggcccggtctgataagtcaccagttgc

SEQ ID NO: 59 - DNA, 58 bp, Escherichia coli
atcgggacgcaatttctctcgccaggttactgcgggctggagaacttacccctgtctg

SEQ ID NO: 60 - DNA, 62 bp, Escherichia coli
acccgctcatccgggttgagcatcgccgtaaattgtacggtgaagtcatttgttgtgttcac

SEQ ID NO: 61 - DNA, 154 bp, Escherichia coli
gataatgcaaccgaccgcatccgtaaaatgaacggctatacatacacgcttaaagaaaacggtatcccctatgctggtgtcattgcacaggaagctctggaagcaatcccagaagttgtaggttccgcaatgaaatatcaggacggtgcaagcg

SEQ ID NO: 62 - DNA, 107 bp, Escherichia coli
gcggtctgaagatgtggcactgaggtaacgtgctggtgtcactggtattgctgaagttatggtttttcggggtcaggtgagcctgttgtgtgtatgctttttgttca

SEQ ID NO: 63 - DNA, 180 bp, Escherichia coli
ttttaatgcttcaatggtgttgtaggtggtataaaccgcgcctgcttctgaaggtttaatgtggaagctgactgatactgtcatttgtgccggttgctggtcgcggctgtaggcctgtaatccctgatagaccacagcctgattacgcgtggaaattttctctacgctttccataaaagg

SEQ ID NO: 64 - DNA, 114 bp, Escherichia coli
gctgtgtaccagcatcgagagaagaaattcaggatgtattcagcactgagttcacaagctctgtagctattaagtcagtattatttacgtttacgatacatgttattatcgcag

SEQ ID NO: 65 - DNA, 240 bp, Escherichia coli
ataaaaatgtcagcagacgacaagttatgtaaatttatttcatcaaatcgtgatgaacacacacattatgcgttgataaaagggacgttatctccctgtttttctcatggaattaacggcaaggcaggcgcggtaacagaggaataaatccccctgccgacagtgatattattcattatcggcaggcagaaataaaacgcgttattgcgtacagcaatattcaaagattaaggttatttc

SEQ ID NO: 66 - DNA, 390 bp, Escherichia coli
cagaaacgtggattttatcatcaccataagcaatggcagcgacaacaccatcaatttctatatcaaaggtggtgaaataaattagaaaattgtttatttaatccattagcgataagttttattgttatttagccgagatatattccattgaaaaaagtaaattggcactgatattatatcaaatgggaataatccttttgtaaataagctgaggaatgtgttaattcacatccagcgccttataaaccgcatcaaccggttctgagtaaaaacttacctgaaacttggtaaacaactctgccggaactgttggaatatccatagccgaggatatcggcaacagaactcgttttgcgtcgctatcgaaggcgagttgtaaactagtggcaa

SEQ ID NO: 67 - DNA, 303 bp, Escherichia coli
ggggatgaacggggagtcggcaggtaacgccctgcgaaaagttatccagtccggattaagcgttaagaaaatcagggacgtcaataaagtcatggcccgccagaaactcggggtacagctcgattttactgacggcaaagggagttttggcggtcttgataacatgttcaggcaactggcaaagctgcgaaaactgaccgacgttaagcgaactggtgtacttaaggcaatatttggtgatgatgccgaaacccttcaggtggtcaatgcactaatcgataaaggaaaggatggctacgacca

SEQ ID NO: 68 - DNA, 224 bp, Escherichia coli
tggttgagaacactgtagtggcgcaattatttgatgtgcgacaactccactcgttatgaattcctttgagtttcttcctgcgacatccactattacatcatcgaacttttcattcagagcctgtagtgtttgtgtcaggttatcaaatttctcaacaagggttattgctggtaacagtcctgcagcttctcgttccgcatgatgttttgcggctgttcgttgta

SEQ ID NO: 69 - DNA, 270 bp, Escherichia coli
aagaagatgatgcagttataaagcaaggcaaacggttatcatgaatatatattcaattttaataagtaattaatttgcttgtgcaccagggctgtacgctttaccacacgtggtgcgacccaaacgatattgctgccagcaatcacgccaagaatttctggcaaagcatggaaatcaaggattcgtgctactgcccgaccatatccggcgacggtatggataaggataaattcaccattatgctcgacactcaggaccatttcagcgacg

SEQ ID NO: 70 - DNA, 204 bp, Escherichia coli
cagttcggggccgtcgaaatactcctgtctgacgcacagcaccacgtggtattccggcttttccggatgacgggtcaggagccagcaaaggtcgcgtccgggtttcgcattcatcagcgcactgacggtttcgataaaatccataccaaaccaggtctgtctgctgttgaaggcgttgtcatgttcccacggcagacgaagcag

SEQ ID NO: 71 - DNA, 187 bp, Escherichia coli
agatgttccagtgttattgccaactcctgcacgccctagcccagcgaccacagctctggcatgagactcaagatgtgctggcgctgcccaccgttagtgcaccggtcacgcaggctcctgcacctacggccttgttgcaccatgggttactgcgtcaggcagcactgacgccacaggaaactgcgct

SEQ ID NO: 72 - DNA, 126 bp, Escherichia coli
atactcatggtaatggtattcgttggccaggaggcggcggttctgcgttagcattttatgatggcggtgggttcacttatgtccaggattcacagtatcaagtaagcccggggacttcttcccgta

SEQ ID NO: 73 - DNA, 198 bp, Escherichia coli
agagcccgtgcagcagctaaacgagacagcagagttgcccgacagcgaattctgagcatgctattgcgaacagacaaacattatgcaggaaagcactggacaggaaaacatcgaacctggttagctaatcaatcatttagtcagccatctcaacagattgcttttcaacactattgtcaaagtctggagcagattgaa

SEQ ID NO: 74 - DNA, 169 bp, Escherichia coli
attaataaggttcacactcctcattttttacagtctgaagttcagctactaacaactcataacttaactcactgtaatctgagtaaaatttttgagcaagaaggccaagctgattccatttatagccagtttccggaaaatcgacaggcagacctttagcatcagaagc

SEQ ID NO: 75 - DNA, 266 bp, Escherichia coli
gctggtaacaacgcctgaattttttcaactgcatcaggggtgtctttctctatccagcggaaaattttctgggtattgcgagccagggcttccggatggctgtcgtcgtacagttcaggaaacgtcatacccaactcaaaataagcctgggttattccagctgccggaactttttcgccatcaggacgcgcccaggcattcatcgccatgcggatgtgttcatgcttgattttcatgaatccccccttggttagaaggcggattat

SEQ ID NO: 76 - DNA, 180 bp, Escherichia coli
gggcttccactcgtcagcgtaaatggttttaagctcgaagtttttcaccgtaaaattatgcggcttctctttgtagtcgagaaccagtttgcccacatcaatcccgccgctgtcagtggagaggatgagcgtattgccgactttaatcggttccggcgtacccacatgtgcatgtccggt

SEQ ID NO: 77 - DNA, 250 bp, Escherichia coli
cagcaccatccagctccagtcaatatctttctcagccataactttcagcacgttaaattcaactatcgtaatcgtcatttttttgcatccggatgaaataagtcagtatctttaattttaaagtcttctagagttgcagtatgtgcattattccataattcatatccatctaaaccattcggttcacctgtttcccatcctaaattacaataacgctgatactcgcggcattcatgagtatagtagttca

SEQ ID NO: 78 - DNA, 185 bp, Escherichia coli
gaagcgaacttacgcttatataattttcacccgcagcataaaaaaaagacgcatagcacagcggagataatggaaaatatccgtttcacaactgagttggacgacattgtagaatgtgatttggtgattgagaatattactgaggatatagagaaaaaaaatgcactatacacacggatgaatac

SEQ ID NO: 79 - DNA, 255 bp, Escherichia coli
aatatggtcatgctccgcaagaacttcatcaactggcggagcgggaatactctctggtggtgctttgcggcgcagaatttcccttcgtgcaggatggcacccggcaaggagaggtatttcgcgcacggcaacaggtgtggtatgaacaggaattatcgcgcaggaatattccttatctttctgtttcgggttcgctgcaagagcgactggggcaaattctacatcgccttcccgactgactttgaacatccactc

SEQ ID NO: 80 - DNA, 368 bp, Escherichia coli
cctcggtaatgacaccttcatgacggagacgctctataatgagtcgggcaaaatcatcattaccaacacatccaaagaagatggcccgatgggacagttttgccacctgagcagcaaaaattgctggcgcaccgctgggaaatggcccgataaactccccaggctgagtgaatttttgatgtgggttgcgggacaaaaactcggccagcaattcgcccatagcgcagatagttattgtcacaaaacccctctcattcctgaagcctttcgcgattggaccaggtaaagcactcattactggtataaaggataacgaaatcagccgactgcaattgttgctgatattgttcgttaatgctgcggctggc

SEQ ID NO: 81 - DNA, 338 bp, Escherichia coli
taaaacacgaaaactcagaaaaggttaaacgtaacctcagcaaaatagaatgccatcttgattgcttaaacaggaaagattgttttgtggcagcattaaactgattttaattttcgtaaacacaggggtaacaattttaccaaactggatgtgtatcagacaaagcaatgtgtattgtaatgtttaatgaaaacacttttagaagtgtttatgaaaatacgtgtatgtttagtaaaacacttagtaaaatacgtatatagtaccattcccgacattctcaacatcttcagacatccatgcagactgagtgttgatttcagtttttcacggccagcatg

SEQ ID NO: 82 - DNA, 208 bp, Escherichia coli
gaaacctttgatagtgtgtgggatgcggtgagtgacacccctgaacaagcggaaaatatgcggatccgtgccgaacttgtaacgatcattaataactggattgaacaacaagggtttagccaggctcaggcagcgtctgctttaggggtcactcaacctcgcatatctgaacttgccagaggtaagatccagatctttagtatcgata

SEQ ID NO: 83 - DNA, 207 bp, Escherichia coli
acagaactgggtagctggcgcaaatacaccgggcattttcatactgtgtaacgcgcatttataaagggaacatactatgcgtaaaaaagaagagaatctgaatacggcatcaggattgcgtgttgccatgattttgctgggtattgccgtcacacctgtgctgttgtcatcctcaagcctcggcaatcaactttccagcggcagttt

SEQ ID NO: 84 - DNA, 251 bp, Escherichia coli
aatccttgatgtcaaccctacagctcgtactcataaagtgaagagctttgagctgaaaacggtttatgccgatgaatggatacccgatccaaccacacaaaaagttatcaatagctggaataaaaaactgcggatcttgtacgccaaccagtcggtgaatcatcgattgcattaactcgtgcctacggtgagtcatcgcaacttggcaacctgtttaccgatgcaatgcttgtcgctgcaccgactgcaca

SEQ ID NO: 85 - DNA, 195 bp, Escherichia coli
cccgtcgctgctatctgtgagttaagagacaaaacatccatatcctgaagttgtcctgctctttcaagggccgcctgtgactgcttaaacacatacttgtcgtgattcagtcttgccatttgagccttataggaaagatcctgccccctaatagccctcgcattcgtcatgtcattattgcgaatgagtttcgtt

SEQ ID NO: 86 - DNA, 285 bp, Escherichia coli
gatatggcctttgccaagcgagcgagattcccaccaagctctccaggtctggtcttgcggttgatcactccccttttcccttacataccaatgattctttttcgactgcttacccatttctgcggttgggtacatcggagaagactttaacttatcaatcagcattctagacaccttatttatcagattttgagcaagacatagtgtgatccaacattttgattaatcaagcgagttcattcaaacaactatgcagttaacgcactgtctggatccgcacatcaa

SEQ ID NO: 87 - DNA, 385 bp, Escherichia coli
ccagaccgataaaataaacagagtaccaactgttaacatagatattaataatataatccagcgtcgataaacaggctcaggtagcatttttctttctggaatatcgggtacaggccatcccatattatgactcgatactattttctggttgagaactgataaccctacagccacatgcacattggcaatgattaacaacgacattacgacctttttccgtcgctgtcgggtcaccttcttgtatgggattcacgccgtgctttgggcaggaaaccagatcacctacgagagctacctgaatgccattgataaaaagcgttgaagttgcggtaatcaccttaccaccatgagtcgtggcatcacctaaacaaacgatcccaggcat

SEQ ID NO: 88 - DNA, 203 bp, Escherichia coli
tcacccttaccaaagttttctggtgtcttactgaaacgacgagtttcgttataggcaacaaaagctgcaatatccgcccccgcaccggggatcatgccgataaaaacccctaatcctgatgagcgcaaaatggttaatgcgatgcggcgtagtgtttgccagggcagtaacagactgccgatagccaccttcgcgccccgacg

SEQ ID NO: 89 - DNA, 267 bp, Escherichia coli
actctgataacacagacaggctcaccacggctattttctacaatcttatactccccaatcatcggaaatgcgttgtcttcaatacatcccgccagcgaaccacaggaagctgttttaacaccagtcgcaatcaacgttgcgaggtgatcggccaacgctgctgaatcgccaaaagtacaaaaggaagcatggggatatttttgtgagattttttcttttatggtcatgagaatattttcgcgattacagaaaaacaaatcacatctt

SEQ ID NO: 90 - DNA, 285 bp, Escherichia coli
aataaacagacgctggcaggccagcccataacaccgatgccaacaaccaacacgatcatcataaaaatgatcggtgtaagcgcgacataaaaactgggtttttctctcataactttattccctgttaaaagacttatacgccattttgctgtaagcgttcctgtaccgtctgaatatctacctgtgaaacggtagtgttatttttaatggcaatagcagcggcagttcctgcaccttctccagtgacaatacaacactccatattacggattgtcgcataggcga

SEQ ID NO: 91 - DNA, 215 bp, Escherichia coli
agcttcaacttgtaggtcattcctgaacttgggtagtgtcattttacatcctctttagtgaagttttcgctatttaaatcagcagcattccttttaaatcactggcatgtcagcagtggatagtctgagtgtaacgtccagtgaggggaataaatattggtcagactttgcacaaaagagccaactatcgcgggctctctctcatcatgtgcgaa

SEQ ID NO: 92 - DNA, 449 bp, Escherichia coli
ctgggggcatatggctgaaacggcgacaggcgatgacggtcttatttatcgaaggcctttgctgagggacgagaatagtgctaccaccagtatcggtaccctggtggaagagggggaggcctggtctacgttcccgtcgggccaggctaacgatacctcgataaatggttgtggcgcggagtatgttccaactgacaatgaacttagggccatttatgcgcaccaggggagtagcgcattacatgacgctattggctggccagtgtcgaggttctatatctcgaataccgttgcagatacgttcactcaaacctttacgtatgatgtcgtttcgctgaagacaggagatgaaacgcagatgccctcatctggtggtgcattactgagctgccggaccacgcctgtcgccgttgccagtcagatcattgttgaggcgaatgatacggcgc

SEQ ID NO: 93 - DNA, 231 bp, Escherichia coli
atgtgccctacgatggcatgatatcgactttgttggaaaaacagcccatgttcagagcgcaagtgttgtcggagttatcaaaggaacaaagacaaaagccggtacccgtaaagttgaactgactgaagaagcaatgttggcgttgataaaccagaagccatttacattcatgaaggatgctactgtctttgaagatccaaagaccaataaaccctgggcaagtgctgatgc

SEQ ID NO: 94 - DNA, 304 bp, Escherichia coli
gcctaccagaacgttactcatcttcttcaggatgcggagcatggtgaagctggtcacttcacttccatcgagcaagaatatccccagatactcaacagagcgcgagcaatcctcgtccgagaaacggcacatgtaaaacttcagccgtggcaggatgataagtggagtcgagtattgccgtatttgcgtcaaatctgttaggagtatagccgccagccatgagtgttgtattaaaacaaggatgtctatatatgggatagcgagagtatgaatatcagttattttgagagttaactgattgtga

SEQ ID NO: 95 - DNA, 161 bp, Escherichia coli
tgccctcttcataggcatcttcgagtgcacgccacgcactaaaataatcgcgcatggcctggtgcaataaatagagatcgaagtattctagccccgatttttttaatgatgcttcaatacctgctgctgcaatatcctgattcaacatatcctgcacccac

SEQ ID NO: 96 - DNA, 161 bp, Escherichia coli; identical to SEQ ID NO: 95

SEQ ID NO: 97 - DNA, 344 bp, Escherichia coli
taaaaaaaccttcaagagagatgttttcatcgccagagagaaaccccgtgtatatcatatccggatgagcactattgtagaaccgctcatcaaaatcatccggcaaatagggatagcgcttttcacgccatacttcattgtaggttcctgcatactggaggcgacttttccaccatcgagatacagggccaacaccttgaaaaaagtcagattccccattaaaaatggtagcgttttctgacaaagcagagctggttatttgtgggagtttatattgacaacttgtattaagttgagaaatatcaggataatatccacaacctacagggtttgctgaaaaaacc

SEQ ID NO: 98 - DNA, 276 bp, Escherichia coli
ctttcaggccgtcttcgttctgtgcggactcctgcgccatctgatccagataatagcccggtagcggcgactggctgccggaaaaacccaggaaccgggtttgcagtacatactgtccgttctggctacgggaaagcgcactcaggtccgtacccggaaaactgatactggcgtcagagctgaaacgcacgatctcccgggcaggctcggtacgcagggaaatgtcctggcccggcgcgccatgccgacggtacagcgcctccatcagcacataga

SEQ ID NO: 99 - DNA, 244 bp, Escherichia coli
gagtcctggcttgcgccgttggggttatcgttgatccgcagtccaagtggtacgcatattgaaggtagtgaagggcaagtccgacaggcaatggcattactgattaacggcattattaaccataatgagccgcaaggtgtcgtgtattcacgtctggatcccggaagctataaagcattagtccattattttggagaagaagaggtgttatttgtccagtcattgttactggatatggaaaatg

SEQ ID NO: 100 - DNA, 326 bp, Escherichia coli
aagggaaaatgatgaactattttaaggaagcacatttttagaactcttaacaggagactaaaaatgtccacgtttaatacgcgtaaagatagggatcgtaatggtaaagcgaagccgcataagcattcagggatcccaacacttacaggtaaatggcgtcacccttcaatggattgttgggtaaactacagtacaccgggcgatcatgaatggaagcggctctatactacgcttcgccgtcgcgcagatgatcgacgccaatgtcatcgggtaatgcagggggatgatccggaaggaatcgtctggttcccggactgttatccaca

SEQ ID NO: 101 - DNA, 409 bp, Escherichia coli
tcgtcctgattcacgaacttgcggagtcttcttttgttttttcactttcgcgtttttattttttggggccagcatcataggaaatacgcggcacatattaaaaactactgtgagacgctgccagcagattgctgcgaaaaataaactaaaacaaacgaccgacacccgccaaatgatgacatcgtcctgaaagcagaaaaaccagaccgtaggtgtaatcattgatatcatccacatgccaagtcctggacggctggtaaatcgccagaggacaatgatggcaacgatcatcagcactgtccaggcaaggcatggcagcgaaagttgcggattagcaaacagatgattgggctaaagcatccaaagggctaaggttcgctttgatatgggtaaactgtgcgatgctttc

SEQ ID NO: 102 - DNA, 285 bp, Escherichia coli
actgtcgatgtagccatttttcttcctcacatccagccacgaagttgatgctcaacagcaaccacgtattcatcgaataatgacgatatttgcgaatcattaatgatgcgcacgtttacaaaatatccgtcttccttaacacataccggttcgccatcttcagtcagttctccggtttctttgtacgcgttacctatcacgtcaataagaatatcatcctgcatcgactcgtcatcataatagccaatactctccataaaggccgaaaagtcggccctgtcggca

SEQ ID NO: 103 - DNA, 285 bp, Escherichia coli
cctgcagacgctgtggatcatccttgttgtcttgtttcaaacgattcagggcggccaccgaatacttattcttaacccaactaacctgagctaactgaactctctgacaagcgtccatatcagtagttgtttcctgaggcatatcaaagcaggaaataaaaaaagtctcaacaccatcatttagactactgctcggctggttcaaagcatcagaagcattggatgctatcggtattatcagtgctaccgacagaatcaaacgtttaacataaatcgctcccattt

SEQ ID NO: 104 - DNA, 263 bp, Escherichia coli
tgcccgggtctgggattgcattcccgatgcggaaaccgccctgagcgcggaagaaaaatctcatgccctggtgacctggttacaggcattagtcaatcaactcaagctacccaacaatctcgcggatctcggcgtaccgccagaggatattgcctctctgagcgaggcggcactgaacgtgaagcgccttatgaacaatgtgccgtgccagcttgatctacaggacgtacaggccatttaccaaacactgtttccgcaacatc

SEQ ID NO: 105 - DNA, 220 bp, Escherichia coli
cagtctctgttgtaagatgtaccctctgatactacgttttcgttttccctgtgtatttaactcactgtatttattgtctttttaaacctgactggtattctccggtcatagtgtgccggatatatatcccgtaatcttctcatttttatataaaaatacctgcactctcttcagcgcatctgtctcctttaagtaaaaaatgttttcacgtattgctgta

SEQ ID NO: 106 - DNA, 298 bp, Escherichia coli
cgatttcattatcagccagttcaaatgagggttttcccgcggcgggaaccgtacaggctgacagtgcgatgccaaaagaacgggtggcattgttaacatctttgccaagttgctcgcactgccccaggttatatccctgaagtgcagccgcaccgacaatcttttcaacaaaaactgtacccgcaacaccgcgacgtccggctgtatacaggctatcttttaccgctacatcatcatcaataatgacggtcccaacggcgatgccttcttcgtgtaacatctcgactgccgtttcaga

SEQ ID NO: 107 - DNA, 240 bp, Escherichia coli
ttaccaaactggatgtgtatcagacaaagcaatgtgtattgtaatgtttaatgaaaacacttttagaagtgtttatgaaaatacgtgtatgtttagtaaaacacttagtaaaatacgtatatagtaccattcccgacattctctacatcttcagacatccatgcagactgagtgttgatttcagtttttcacggccagcatggatctttactggtcaaaaaacagacaggtttactctgg

SEQ ID NO: 108 - DNA, 244 bp, Escherichia coli
gccagtaaatactattcttgactattcatacgttcctgtaccaacaaatgtatatactgcacttcaaccattttaccaggattttggttatactggcatcatatttggagcagtattatacggactaatatatgtgagtttatacacggctggtgttcgtggaaataatacacaggcattactgatttacgcattgttttcagttagcagtgcaacggctttcttcgctgaaacgctagtaaca

SEQ ID NO: 109 - DNA, 230 bp, Escherichia coli
tattgagctgatgcagaatatcctgtgtctggctgtccagacgcagcagataaaacagataaaatacggtcagcacaacaagaccgccgcacagtacatgcttgatggtcagtcgtcggattaactgataacgcccaccctgtatgttgttcttctgatgaagtagcggaaatggcgcgtcaccgcgcagtttgtgcagggcatggtgcaggcgctggtaaatccgctca

SEQ ID NO: 110 - DNA, 187 bp, Escherichia coli
cgtatagtgtaccaatgataaaaaccatcaggcttaataatggagagagtaaggaagatactggtatcgttatataccaaacgcctttactaaacttaaactcatccgacacattccgtttttttcgtatttgagagaacaaccatataaacagtccctgccatagtactatgaagaacagcataaa

SEQ ID NO: 111 - DNA, 222 bp, Escherichia coli
  misc_feature (194)..(194): unknown
  misc_feature (197)..(197): unknown
gttatagcagtgatacgaaacaacaaaacggaatgattgccagccgttagaaaacaccggacactctcgtgtaaaaagctaccctgtctatggatatagcgatatcaactcatcaagcgtggactgaatgatattcagctccatatgggcggcaacctggaggataaacatgatttcgccgttggaatcaaggntgntctgcaatatctaccagactgcttc

SEQ ID NO: 112 - DNA, 409 bp, Escherichia coli
cattgagataaggcgataaaaacgatgattctcgcaaaggtaaccggacatgtcgtcgccacgcaaaagtgcgatgagctgcgcggcagcaacctgttgttgatcacccaactggatgataaccaacagctgatgaaggaccgctcctgggtcgctgtcgatagcgtcggtgcaggcgttcatgacgttgtgctggcggaggagtacttcgcactcaataaagatcgttacaaagcgatgtcagtggtcgccattgtcgagaaggtttttcgggacgcttaaggagtgaaaaaaccaatgagtgagtttttgctgaaaccccggatctgcttcggtcaagacgcgctgtcagtcctggacgagctaaccgcctgtcgtgttttgctggttaccgatcaggcgatggtca

SEQ ID NO: 113 - DNA, 242 bp, Escherichia coli
ttaaaagatacaatgcgctgacctactggtttctgcagggtatagcgcatttctgcgccttttgacatttgcaggatgccattggtaagcgatgccccgtgctccagtaggttacgcagatccttaccgctgagatccatttcagtaagttcattcttgaaggggaatgtactggtaatgtcaccaaaggtaatcgtgcctgcatttatatcagcacgtaaactgccggagtttatcaacgc

SEQ ID NO: 114 - DNA, 289 bp, Escherichia coli
cgccatctcagtgtacatgaacaaacgcactatccgctgaccttgaccatcactcaacagaagggattccgtttcagtattgcatatgcccttaactacctgaccaacaacatggcgcaagcgttgctgatgcacctgagttatctgcttgaacaactggtggacaatccgcagcgccccattgctgcgttggtaaacttgtccccatgccagcaggcgcaggtacttcaaccctgtctggaacgcatggcatgccgggattgggacagtcaatccaacgtcatcgaac

SEQ ID NO: 115 - DNA, 243 bp, Escherichia coli
gtccatgtctgatgaatactatggggagtctgaaacaagtagtctaaaatctgaaacagacttagttctttgtaaaagaaatacagatattcacgtgacaggtagtgctcatgccccttcaggggataagtctcagtggaaggcttgtgtgagggttaatagtttttctaaagaactgagtttatctggtgtccgctacttacaatatgagcgaaatcgttggcagatgagcttaccagataa

SEQ ID NO: 116 - DNA, 261 bp, Escherichia coli
gactggcattactccagtaatggtgacgtgaatacctggcgctgccaacgaacagccgaaaaaactcacctgacccggagcaaaaagcggattattcgacaacagcataatatcagcagcagttctcgacacgcttgcgctatagacagaggatgaaacgctgctggccggagttctctgtacatttttggcaacggaagaacagctcaccaatacctcaacgtctatcagcgttccggtgaactggaacagcacgaacag

SEQ ID NO: 117 - DNA, 221 bp, Escherichia coli
ttcagtgtataaaatggtgagttctcattaggaaagtaatatatgtatttgttcagtatattcattacatctattgggttggttaaatataataactggcattcatattctgaaacttctctttcgcttatcagcattttatataaagttgccagggtgcttgttaatgaagttcgtctttcgaaagccagtaatatagtgagataataacatgcaacctg

SEQ ID NO: 118 - DNA, 191 bp, Escherichia coli
gaaaaagtcgcccatgagacaccggagaaaatcagcagtgtcagcattgatccactgacaggcgtgcagccttgccatatccgcgaaatgtttgctgttctgcaactggaacacgggctatttgctacctttagtcgcctggttaatcaggcgtggaaagcctttaacgaactggatttcgccctgctgga

SEQ ID NO: 119 - DNA, 203 bp, Escherichia coli
atcgtcgggagtaatgtcggggcattcagcggtgacactattcgtaaggtcatcccttcaagttcgatagtctgaatatctacccgcgtttctgtctcacccgcaaggacagcgctggcgatatagccctctctgcgctgcgtaatactttgttggcgcgatgaggggcgacccgcagcgataaactcttcgactaactctgc

SEQ ID NO: 120 - DNA, 184 bp, Escherichia coli
gtggcgttacggaatattcatcggagctatttttgcagtcatcttcatgattttgcgttacttctttattggtgaatccgcaatgtgggccgcacgcgtcgggcgttaccaggaagcgtgcgacattctgggaaaacgttatggtgttcaggctcacgttgcggcatcgggtacaacagaagcg

SEQ ID NO: 121 - DNA, 181 bp, Escherichia coli
gagctatagccgtttctactaatagattaaatgctatagagcaacatttggggggtatgaggaatatttgaaaccagacaacatatcaggaaaaatgctcaagggaggtccattccaaaactgagtacaggctagttatcagcaatgtttattgccattactttgtttatttgattacggg

SEQ ID NO: 122 - DNA, 236 bp, Escherichia coli
cttcctttaacgcgtcccagcgccgtttggcatttggtcattttgtctttggctatggagatctcaatacgcataacacttcttttgtactgcgtttgtagacagtattattcttatctgtgtaaataaacagtatcaagacttcgttttagctgcataagaaaaaagagatggatacattcggaaagattttgatggtggtaggctaagtgaatagcctaaaggtgttttacccc

SEQ ID NO: 123 - DNA, 192 bp, Escherichia coli
tgctccttatcggtggttaagatttactggtgtaataaatgaaaaagccacgtctcccggagaagacgcggcctgacaaatgaaatgaatgacgtttattgtctgagaagcccttcactggtgagctgcgtattttcatggaaggagatcacccaatatccccatcgggtaataaccggccagactgtgatc

SEQ ID NO: 124 - DNA, 353 bp, Escherichia coli
tctcaacaagggttattgctggtaacagtcctgcagcttctcgttccgcatgatgttttgcggctgttcgttgtagatctccgtttaacaggcagacttcccttcctttatttgcgagagcaatagccaggtttgatgcaatggtagttttccctgaaccacctttgttcccaccaactacagtaatcattgcaacctcataaatgtgatgtgtgaagtatgatgatattttgacacggtaacctgaggtgtcaatatgtgttcatatttatgaagtatgaaatgtgaagtgtgccatgtgatgtaataaataatacttgggttttgggatttcataactatgatggtgctta

SEQ ID NO: 125 - DNA, 147 bp, Escherichia coli
ctctattctgcgcttgccatggaaaagattctcctgaaatgcaggtatcagtgctttccctccgttatagtcatcattgagcataacggtatcgacaagtgataaaagtgattttagctgtaatcgctcatgagtctgcagatactt

SEQ ID NO: 126 - DNA, 222 bp, Escherichia coli
gaggcgattggtatggagagaatattcagtgccagcgccgggctgacgtcggcactccattgcacctggacggtatggtcatcgattttcttcaactggctggcgatattttccggctgccatcccagcacattgagaataaacgcaccggatttattcagtgtgacagcccggacataagagtaaatcacatcttccgggcgtaccggattaccagaggca

SEQ ID NO: 127 - DNA, 201 bp, Escherichia coli
gggatcaaaacaggatgtcaccgagcaagccatgatgggcatgaatgtcataaccttgagtgatgtggcttttcttgccgattatgaacccgatttggggattttgtttggaccgtatctgactgacgatccgcaaaaactgttcaaaatatatgaaagcgactggtttaaacaaaaaaatgaaagtctgaagaaaaaggg

SEQ ID NO: 128 - DNA, 202 bp, Escherichia coli
tttggcgtctttccgttcaaaactgccctttcctgactcagcatccgcaagcgagttgcgccagtatgaggtaaaccctaaagcattttcatccattaccagtcctgtgactcaatgaaatccattgatttatcgaatatgaaaccaccgtatggacaactattgtccatattgaaaaagttggatgcaatgttttgtttat

SEQ ID NO: 129 - DNA, 225 bp, Escherichia coli
tgattctgataacgactcgctgtcagcatggtgccgatgcgtgggaagccgttatacagacttgcagcaggagcattatcgaaccagtcggagtcaccggccaggcagacctgccattgcccggcatcactccgcaaacgggcgagacaagccagaagaaccaactcccccgaaggaagcgaagggatatcagctaacaggtagccacaggaggtctttaaaacg

SEQ ID NO: 130 - DNA, 244 bp, Escherichia coli
tgagacagaaagaaaaatatctaaaacaagtgatgatgggtattttttgtgggcatttgataatactgtccacgaagcaggctattggcataacacagatccggctgcgtattcctatagagattaccagaatggtaaggctgtgaaataagtgtcaggatactcaggcggcggtactgtgcgatacgcagcttagtttggattactgattgtattgtggcctatattgaagcagctcagcagg

SEQ ID NO: 131 - DNA, 141 bp, Escherichia coli
taagatgaccatttccatctataaactcagggaatacccctattgaatccgcacgacgtccctcattacaaatatcattttccgtaagctggactcgcccaataatatgtcttgattctcttgttcccaccgtcataccga

SEQ ID NO: 132 - DNA, 266 bp, Escherichia coli
gataatgaacagtctttgacttatcggcagttggatgaccgctgttgagcgggttgcgcgttatctgcgccaacaggggatcggacgcggtcaagtggttgggattatcgctgagcatagcgctcaaacggtgatggttatttatggtattttgcgctgcggcgcggcatttctgccgctaaatcccgcgttgccaacgacccgcctttacgccatgtgtcgtaaagcgcaggtagcgcatatcctttacgatccggcgatgcatg

SEQ ID NO: 133 - DNA, 251 bp, Escherichia coli
ggctacctcatcaaatgccctatcgataactcgaaaacattcgatatcaggttcagcatgaatattaatattttcagaaacgataaataatggaaaaatcctcttcatttttttaggatcattgaccacaaccaaggatgataatgatgataaaaacatctcacaaaacatgatgagattaagtattaatgcatgtgatttttttgtatttttacgccaaataccagcacattttgtagccgcaaagaaag

SEQ ID NO: 134 - DNA, 159 bp, Escherichia coli
ggtgatgatcctttttctctgcgctggatgagtgaacatctggagatccttaaatcgctaaatgcccttggtttggttgttaatgttgaatcagtagaacgaatggaggtattacagcagcgggctgatgggttattgttattgccagttatctgcgat

SEQ ID NO: 135 - DNA, 197 bp, Escherichia coli
cctgttcagtcatcagatatcgactcccttgatatggatcatatattatcacattcccagcatcatcaacacccttaacaagtacccaatgccctactttacttccagaatcccacatcatcgctccccatgaaccagtattactgagggcatataaactagattcgctcactgcattcccttcccagccgacatca

SEQ ID NO: 136 - DNA, 197 bp, Escherichia coli; identical to SEQ ID NO: 135

SEQ ID NO: 137 - DNA, 174 bp, Escherichia coli
gtaaaacaaggtgcggtatcggtaggtagattttctttgttatcatcatccagaacagaaatagaaaactgtcgttcaggtgttgatgtcgttggttattaaaatggttggattaggaagagaaacatgtgttgtatcattttttagttttatttctttgatgttttctttgtt

SEQ ID NO: 138 - DNA, 203 bp, Escherichia coli
catcctatgaacctaaagaaaacactgttaagcgtgttaatgatattgcaactttgcttattggtagggtgtgactatatcgaaaaagcgagtaaggtcgacgatctcgttacacagcaagagttacaaaaaagcaaaatcgaggcgcttgaaaaacaacaataactcgacaagcgcaagatagaacactttgaaaaacaaca

SEQ ID NO: 139 - DNA, 179 bp, Escherichia coli
tttaatccaacttcagcaggccgatggatagtatcccgccgcataatatgagtaaatccgctgatttcctggaacgtgaggaatataacaatagtgccgtttttaactaaatatcgtaaaaaatattagatatgattcacgctgactcataagccacaaatataaataacgcttaaaca

SEQ ID NO: 140 - DNA, 308 bp, Escherichia coli
gccattgcttaacccggtacgcgatgccaccctggcctatggtgattatcgcgatcacggttttctggcggatatgggattgtaccagggcgcccgcgtagggccgtatgtggagcaaacctacattcagcttcttgagcagcgttatctcccctcgttaatgaacggcctgatccgggatctaaacattgccccgccagagagcgaagaaaagctcgctgtgctgcgcgtagtgcgcatgatggaagacaaaagtgggcgcaacaacgaggcggtaaaacagtacatggcacggcgctggagcaatg

SEQ ID NO: 141 - DNA, 194 bp, Escherichia coli
ctcccacgattatcgacctccaccctgtcaggatgcaataatcttttcctctcttttggtcctgatgtaggtagtgaccagcccatcagactcatggagtcatcatatcgccagatggattttcctttcttatccataaggtttgaacccatgactccgggcagaaaaataaccggaataacccgtagatcctc

SEQ ID NO: 142 - DNA, 298 bp, Escherichia coli
cctatgcgtggttttacgataccgaagccctgactgttcccgcagttggggcttcaactttctgctctatcagttatatctttcccttcgtatacttcacctatattgctaatgctggcagaacatccaagatgcttgtatcttatgatgtccaacacgcagtcactacacagcatccgacctgtttctttagagtaaatgtatgtttgatcagcgtctgattcgctaatgccgcagaaacaacattctttactcataccatcaccccctctctcttcaagctgtccagcacccgttt

SEQ ID NO: 143 - DNA, 176 bp, Escherichia coli
gcatgagcatcacactaaaaaatcgtatccggaatagactccctgaaacaggattctgctataactgcggagaacctgttaagactggattgttttgtgatggtgactgtcgggaagattatgagaaacgtgaacgatttggacaaataaatactgacaatgtttaaaagcaatac

SEQ ID NO: 144 - DNA, 235 bp, Escherichia coli
cgtcctcaagtttctggcgcaggctaccggacataaaggcaaaggcttccatcagacgctccacgtccggatcaccctctttctcggccagaaagtgggccagatgtggtttttcctgcgccagcagtttgcctagctggcgaagataatccagctcttcgcggtagtaacgttcttcaaaagccacagagatcactccacacaatagcgttgatggttgtccagcaaaatgcca

SEQ ID NO: 145 - DNA, 245 bp, Escherichia coli
tcccccaactttttaccccgctccaggatttcatcctcatcccatttatccttaactataagtggaatgttcagtcgtagattggtgtggacgatgagagcatcacgttttttcagaaatacagcattctgaacagaacggtttacgctaaggttaagcaaagttagatttcccaaagtagatatcgcttgttgccgtttccttaccagtagctgttcaggggtaagatcggttccagacagaac

SEQ ID NO: 146 - DNA, 190 bp, Escherichia coli
ggttgatggttttggcacaacccccatctcacactttggatatcgcatcgcagactatgatgtgacgacactttatctgcttgctttgttcatttcgatagctaacatcgctgatgatgagaaagcagccatgtataatgatcttgtctcctacgtagtacgaagagccgtatgtggcctgacgccaaag

SEQ ID NO: 147 - DNA, 178 bp, Escherichia coli
aaccccgtatcgttagtaacagcttcgcgctagcaaagtgataagtcagaagcagaaagcagctatgtggttgatccgctatcaccagcagaagttgatgcattactagcagcagccggaaacaaacaatgggaaaatctgttccggttcgccatacatacaggcctgcgtagttctg

SEQ ID NO: 148 - DNA, 205 bp, Escherichia coli
cgctcacagagcttaaaacatcattaactttcaggagtcatcaacatgcctaaatcttacacaccaaactggttttttaccgctttacttgacaatcacatcaatcaaatgatggcacgctattcctgcctgcgggccttacggatggatttcttctacaggaaaaatacgcccgatttcttacaacctgatcatcgctggcttg

SEQ ID NO: 149 - DNA, 191 bp, Escherichia coli
gccgttcagtgctgctgcaaaaagtcttcaatgtctgccagtgaggatatcccttccatcggaccttgccgcattacggcgagcgcgccactggcatttgcatattgcagcgccttgtgtgccgggaaaccggataagaaaagagtgataaacgttgcgccaaagcagtcgcctgcacccgttggatcgat

SEQ ID NO: 150 - DNA, 218 bp, Escherichia coli
tcacaacaatactaaaatctgtccgtaatccggacagtgataaaacaaagcaaggcggttaagggatatttttcaacacagatcacattttcgtgatgaataatcgtgatcatgctcgcaaatacgatggaagaaatatttattaccagatgtgagattatttaccggatacgacacaaaaccattcgtatccggcattcttcaatagattacaacgt

SEQ ID NO: 151 - DNA, 251 bp, Escherichia coli
ctgagcatgctattgcgaacagacaaacattatgcaggaaagcactggacaggaaaacatcgaacctggttagctaatcaatcatttagtcagccatctcaacagattgcttttcaacactattgtcaaagtctggagcagattgaagatcgcatacttcaactcgaccaggaaatatctcgcctgttacctgagtggtctctgtgcaatctggtctgccagttgcaggctcttaaaggtgttggtcagct

SEQ ID NO: 152 - DNA, 182 bp, Escherichia coli
ccagtagctggtaaactccagattgatacttcctgcggcctggttccagagcagagccatgtcaggtcttcctggtagccagaaaaagcctttgctacgataaatacccattcccataaaataatgataggtttcccataatctttgtgggtggaatggcctgtcatctttaatcactcacg

SEQ ID NO: 153 - DNA, 183 bp, Escherichia coli
cctaacccgtcaaccttccatccatgacgaaatgagttttgcgacaacgacttacagattttcccattatcattccatgccaacttgattgttgttgaaccatcatcgcagtatacgttcatctatagccccttaaatactcaatctgagtaaatcattgtttctggttgcaaggtaatactc

SEQ ID NO: 154 - DNA, 675 bp, Escherichia coli
atgcaattacctgtaaagttattaatgagccttatatctctggtcagcgttattgcacgtgccgggaaatataaaaattacatccgggatgaaataaaatactggcgatatacatcatacaaggggggggaatttccggaaggtttcactgatgagaaattttccagcgccatttacaacggaagaatatttacaatgaaacgtttacataccctgatgttatttctggcggttctgtttactggctttaacgtggaagcagcgagcgtgaaacaagcgctcagctgcgacccaaacgcccgggctgaacaacctggagcgtgtccaacaacgtacgagttgtacgaaggtgacgctgcctacaaagctgcgcttgacaaagcattaaaaccggtcggactgagcggcatgttcggtaaaggcgggtatatggatggccctggcggaaacgtaacgccagtaaccattaacggtacagtctggctccagggcgacggttgcaaagccaatacctgcggctgggactttatcgtaacactctataacccaaaaacccatgaagtcgttggctaccgctactttggtttagatgacccggcctacctggtttggttcggcgaaattggcgtgcatgaattcgcgtatctggtgaaaaactacgtagctgcggttaac

SEQ ID NO: 155 - DNA, 675 bp, Escherichia coli; identical to SEQ ID NO: 154

SEQ ID NO: 156 - DNA, 675 bp, Escherichia coli; identical to SEQ ID NO: 154

SEQ ID NO: 157 - DNA, 675 bp, Escherichia coli; identical to SEQ ID NO: 154

SEQ ID NO: 158 - DNA, 675 bp, Escherichia coli; identical to SEQ ID NO: 154

SEQ ID NO: 159 - DNA, 675 bp, Escherichia coli; identical to SEQ ID NO: 154

SEQ ID NO: 160 - DNA, 675 bp, Escherichia coli; identical to SEQ ID NO: 154

SEQ ID NO: 161 - DNA, 675 bp, Escherichia coli; identical to SEQ ID NO: 154

SEQ ID NO: 162 - DNA, 675 bp, Escherichia coli; identical to SEQ ID NO: 154

SEQ ID NO: 163 - DNA, 675 bp, Escherichia coli; identical to SEQ ID NO: 154

SEQ ID NO: 164 - DNA, 675 bp, Escherichia coli; identical to SEQ ID NO: 154

SEQ ID NO: 165 - DNA, 675 bp, Escherichia coli; identical to SEQ ID NO: 154

SEQ ID NO: 166 - DNA, 675 bp, Escherichia coli; identical to SEQ ID NO: 154

SEQ ID NO: 167 - DNA, 675 bp, Escherichia coli; identical to SEQ ID NO: 154

SEQ ID NO: 168 - DNA, 675 bp, Escherichia coli; identical to SEQ ID NO: 154

SEQ ID NO: 169 - DNA, 163 bp, Escherichia coli
gcaatttcgcgggcctgctccgtggtgatgatgtcatcatccagggccgaccataacgaccggctcccttcatactggcttttttctgccgggcgcggatacgtatccagcgggaaacaggcgctgatatggtcatgactgctgatgagttttgccatattca

SEQ ID NO: 170 - DNA, 190 bp, Escherichia coli
cgcccgtgcatgaccgacccccgccgtagcacagcaggacgatttgcccgagcaccggtagcgccagcatggtggccccaggcatcgcctgcgagataaccgcaccgatgcgtacacgcacaatctgccgcgactgcctatcgagccagtgcgtttcacgcatctctgccacacaggattttaccactga

SEQ ID NO: 171 - DNA, 294 bp, Escherichia coli
gaaaatgcagtaacttcctcaccgaaacgcatttacagaaaaggtaatccgttaaccggagccgagaaacaacgcatatctgtttcccggaaaaaggggacacataaagcgattaatgttttcatccagagtgaactcaaagatgatttgacacagctttgtaaggattcgggcttaactcaaaaagaaatgatagagcactggattttgaaagaaaaagctgcgatgactgatgcgaatagaaagtaactaagttaccttcttgaacatttgaattgcggatgctagattact

SEQ ID NO: 172 - DNA, 157 bp, Escherichia coli
ctaatctcttcaggtacgctaccgcccttggcttaacagctaccaatacactggaggtaatacttgtttgtaactggataaaatttactcagacggtttgacctttttaatagccgcaaaaaaatttcagcagaaattatttccgcagggataaata

SEQ ID NO: 173 - DNA, 107 bp, Escherichia coli
agtagtatttgcggtattatcaaaatccggctgtgtcaggcactccttccacaaatcccatgcggcacagcgggcatccagcggattcaggattttatcgatggagg

SEQ ID NO: 174 - DNA, 240 bp, Escherichia coli
aggctggaggccagaaaaacggtgattatcgccagcactttgcggcgtaaattgcgcccccaggattgtcgtaacatccgccacagcatgattattcctccctcatgtcggcaggaacaaactgctccggcgtttcacggaagcgttcatagttagcctctgacgagaagaaccaggtcttgccgccatagctgtatttgtaatcggctgaggtattggtcaacgttgaaccatcgaccg

SEQ ID NO: 175 - DNA, 479 bp, Escherichia coli
tgcatacaggcaatgctaaaaagaaagttgaactccccctcaagcttcttgccgtaggcgattacagtaacggaaaagagcaacgtccgctgtccgaacgggacaaggttgatatcaataaaaacaacttcaacagcgtcatggctgagttttcgcctgcggttaatttaacagtagaagatacgctaaacggaaacggtaatgaacaaaatatcgcgcttgaatttaaaagcctgaaggattttgaacccgaacaggtagcaaaaaatattccgcaacttcgtgtattactcgctatgcgcaatttactacgtgacctgaaatccaatctgctggataacgcaacgtttcgccgtgaactggaaaatattctgaaagacccgacgctcagttcagaactgcgtgatgaactggcgaaaattgcgccgcaggagaacgtttaacccgaacacgtattcaggttaaaccggagaagaaag

SEQ ID NO: 176 - DNA, 100 bp, Escherichia coli
gtctgagctgttacgttggcagcagcgaggtcatgagctgcccacgtgtcagaccagaaaaagggaagacgcgggcccgtcgtatcgacttccgacatgt

SEQ ID NO: 177 - DNA, 119 bp, Escherichia coli
cagggggtaatctgctctcctgattcaggagagcttatggtcacttttgagacagttatggaaattaaaatcctgcacaagcagggaatgagtagccgggcgattgccagagaactggg

SEQ ID NO: 178 - DNA, 155 bp, Escherichia coli
tataagtacgccagccatattgttagttgaaccatgcgtcgttgttccggaggtagaggttccgtaaaaactctgggtaataccatcgaccatagtgtttacacgaccaaatccgctcatgcctcgaatattcacactgattgctccctgaccag

SEQ ID NO: 179 - DNA, 273 bp, Escherichia coli
tttgctttagctgccgactatcagccatcgcttaaagaaaccacgcaattttttcaaaccatccagaataaactgcattttgcctgtaccgggcataccgctgcggaactcatccacaaacgagcagatgccagccagccgcacatgggcttgaccagttataaaggtgaagaggtacgtaagggcgacgtgacggtggcaaaaaattatctcacccaggatgaggtcagcgaacttaatcgcgtggttaatatgtggctggactttgccgag

SEQ ID NO: 180 - DNA, 77 bp, Escherichia coli
agctgtaatttgttgtccctgtgtgtgctggcaccggtactctgtacacccagaaagctggccgaagtctccaggga

SEQ ID NO: 181 - DNA, 153 bp, Escherichia coli
caccgttttactcaggattagcttctgctataaccccggcttttcgtttctgtctgagtcgatagctttctcctttgatttgaacgacatgtgagtggtgtaagatacggtccagcatcgcggaggtcagtgctgcatcaccggcgaacgttt

SEQ ID NO: 182 - DNA, 347 bp, Escherichia coli
aaaatcttgccagttgatagcgtagcccccctcattttttataatcaaagaggctgtcagaatatttcgctcgctatgtttaattacatcaaaaaatgcattatagacaggtgtaaaaacgagaatattatcaccatgcgatgtcaataactctattgcttttgcaatagggtacatcacactggggctataggttatccattcaggtttaatatctgtttgatattgttgataataccagtttactatcgcattcagatattcaccatgttgccaacgactgtaccctaaaatcgggtgttccaggcgtttttttaatgctctggtgatagcgtctggtatcggaa

SEQ ID NO: 183 - DNA, 281 bp, Escherichia coli
ccaatcgcggttaaagccttctttgatgccaatgtaaagagtatccatatcgtccgacaacaccatctggtttgggtagaccggcatgttaaattcacgggtgatgctgtatttggtggcatccactacgctgatggtgccgctagtgaagttggtgacatacagttcgttatatttcggattgtatttcaccgcgttagctccggctcctgtgtgcacatagccaagctgtttaccgtcgcgtaagtcaaaaatatagagtccatcttttgtaccggaac

SEQ ID NO: 184 - DNA, 314 bp, Escherichia coli
tttggcccgaataagtcggttatttgtatcttcatcgagatacactgaaactgttctgcttatcccgcctctcgcgttacgcctcctcactcaattcacctctgtttcccgactaataaaatcatgactgcacagaaaccgacgaaaaaaaacacgccaaaattggcgcaccttatttaacatttacttaacaccataaaattcacgaattatacttaatagcgaatctatttctcctttatagatacatgacactctgaataaatcaaagtgttcaaaaaattcttttattttccgtttaactggtttaattc

SEQ ID NO: 185 - DNA, 422 bp, Escherichia coli
cagataagtgccctgctttttgcctgtcactgagttgacggatgccgtcaacaagaacaagtaccccgcttttgtcatagccgcgtagattaaaggtctgcccattggtccgtcctgcaccagtctggctgagaccggcaacacctttcagcatgccggctgatgtgaccgcattctgactccatggcgtgtcattcgtgacgacactgaccattgacggcgtttcaaataccgtgttctgatttcctgtcgcgacaacggtgattgtatctttagccatagaagaatgactggtctctgcctgtaaccctatcgggagtatgattaatgtacaaatgacgtttctgattacgttcatatacatgcgaaaatatatgttaatattgatatgttataacatatcattttattaatgcaaccct

SEQ ID NO: 186 - DNA, 137 bp, Escherichia coli
gtcaagctgggcggaactccggttgatgtctttcgtaataaagagttaatgacaattttcacccccatcattaaaaacgattatcggctctatgagcagtatgtatttcaggccaaggcgcgcacattaacctgtcc

SEQ ID NO: 187 - DNA, 210 bp, Escherichia coli
gtatatgatttcaactgacgataattttaatcataagttcagaacgatatcgaggtatcgcgattttgtaaactccccatcagtactgaatataattgcaactattattgcctataacgaatgtgagggatggttaaagtcattaaaggcacatattgcctctaacattcaattcacccagcagtatctgaatgaaaatattcccgaatt

SEQ ID NO: 188 - DNA, 206 bp, Escherichia coli
tcggtattttcccgctcctggtactggcggctgtcttcaacaaactgacgctgtccgtcctgaaaggctatgtgtttgccctgatgtggttgcagtcatggccaatgttgtacgccattctgagcagtgccatgacattttatgcgaagcagaacggtgcaccggtggtgctctcagaaatttcacagatacagctgaaatactcc

SEQ ID NO: 189 - DNA, 328 bp, Escherichia coli
cagccgaatgttgtacatccgaattcactgacaatatgcgttatgacacgctggaaacctgccatcgtaatgcgttccgcttctttggtggtgtgccgcgcgaagtgttgtatgacaatatgaaaactgtggttctgcaacgtgacgcatatcagaccggtcagcaccggttccatccttcgctgtggcagttcggcaaggagatgggcttctctccccgactgtgtcgccccttcagggcacagactaaaggtaaggtggaacggatggtgcagtacacccgtaacagtttttacatcccactaatgactcgcctgcgcccgatggg

SEQ ID NO: 190 - DNA, 200 bp, Escherichia coli
tgcgggggaactaaaccagtatatagcgtcagtgcggttttcattaagctgacgataccggaagcgactcccaggtgacccaagttggcttttaccgcacccaattgaatgctgtgcggcgcacatgccggtgcgaaaacccggtgcagagcttcaagctcaatctcatcacccaacggggtaccggtaccgtgcgtttc

SEQ ID NO: 191 - DNA, 150 bp, Escherichia coli
taccaacgaggcattgtttcactggcaaaatcagtgcgaaaagaacgcatggaagagaacatcaacattctcgattttgaactcagccctgaagatatgctgcaaattaccgccctggataccgcaaccagcgcgttcttctctcaccgc

SEQ ID NO: 192 - DNA, 141 bp, Escherichia coli
catcttatcggccttcagcacattcgcctgaatccagtagtaggctttatccggagaagtcaccacctgatatccttttgctttcacagcatcagcaattttgccctgcagcccactcatgtctttatcagacgtgttttt

SEQ ID NO: 193 - DNA, 160 bp, Escherichia coli
tgtgagagaaaactctgaggaatgagagaatatatcaaattggtcccccctgctactcccgagtaaacaccgaccagttcccactgccctttggccgtattccagccaaataatggagaaccactgtcgccggcctctccaaaagagggcaggatgctat

SEQ ID NO: 194 - DNA, 176 bp, Escherichia coli
ccatacatcgacaacgcgaccagatttatcgacttcgaggatatggtcacgaatggtggtgacgtgtacgccgtcatcgcgacgatagttactcttacctacgcgcaacagtaccgtgccattcggcgtctcaatggactcatgagtggcgtcagcaaatccgcgcggtagtttgt

SEQ ID NO: 195 - DNA, 162 bp, Escherichia coli
tcctacgatacggtcgatgcaaaagatttattgcaggaaggacaaagtagtggttttcgtgtctttggtactggcggcacgggggaccatagcctgggattaggcgcgagcgcgtttgggcgaactgaaaatctggatggtattgtggcttggtccagtcgc

SEQ ID NO: 196 - DNA, 118 bp, Escherichia coli
agcacttcatgaccgttaacgcgaaatgcctgcgccagagacagcacaggatacaacagcccatagagaggcgggcctacaaacaaaatacgcatgagaaaatccctctccgcttgac

SEQ ID NO: 197 - DNA, 96 bp, Escherichia coli
actgtcgatgttgaaacagccaaccgccacggtctgcgctggttgcacgatgtcgctaaccaacgaaagcatgaaacaatccaggcccgtccctgc

SEQ ID NO: 198 - DNA, 193 bp, Escherichia coli
catatctgaaatagagaatggtagtacatcttttacaccaaatctgtcctcgcaaaagtcccattgggtacaatatgttcctttgcgggaaacaggagtattaaaaacatccatcagtatatccccatatagttatccatatcccgacgcagggcgatgactttagtgccgataatgacttgtagggtatttt

SEQ ID NO: 199 - DNA, 149 bp, Escherichia coli
cgccaccacgactgcctgctgtacccccgggaaacgcatcgcatgggcttcgatttctcccaattcaacgcgcaaccctctaattttaatctgaaaatcattacggccaatgtaatgaatttgttggctttccccgtcgcgccacacca

SEQ ID NO: 200 - DNA, 119 bp, Escherichia coli
ggtgactgctgcaaacacctttttactggcattatcaaacgccagttcatagacgccttcatcaggggactgaaggtaattcgttttcagggcaaatcgcgaaagttcgcgttcaggtg

SEQ ID NO: 201 - DNA, 188 bp, Escherichia coli
ttcctctcccgccgcacagcgccatctcccgtcagcacaacatgtagtgctgaatttagctgttaatgacactatatgttgtgccatctccctgacctgtgatgcgccgcgcaggggcggaaaacagtgatatgatgattttctcagcgtggtacacttccggaaagttgtgatattaatgaaagtcg

SEQ ID NO: 202 - DNA, 321 bp, Escherichia coli
ctgtacctgacctcagctacaccctggtcaacaacgacacgggcgaaaaacaggaaggcaccttcatgccgatggttgccagcgatggcccgcactatggcgcgaacatcaaaatgatgggcgtgggcaactataaagtgacctaccacattgaaccgccgtcaaaagccgggatgcatcgccatactgacagcgaaacaggcgtaggccgctggtggaaaccgtttgatgtgagctacgagtttaaatatgtcggtctgaactaaaaccgactaaccaacgcgccaggaggattcccccttctggcgcgttggtcagacc

SEQ ID NO: 203 - DNA, 249 bp, Escherichia coli
ttaagattaaaagcgcaaagatggtgttattatgtaatcctcataacccgacaggaacagtctggtcggaagaagaactgcataaaatcgctgcaagctgtacaaggcataatgtctggttatgttcagatgaaatccatagtgattttgtttttaatcgtagctttacatccgcgcttaaaataaaaaaagaaaaagtagtagtatttaactcgatatcgaaaacatttaatgttcctgcactaacag

SEQ ID NO: 204 - DNA, 360 bp, Escherichia coli
gaataactaatacggttctctgatgaggaccgtttttttgtgcacagaaaacccccagctaggctgggggttccggaaagctttcagctttgagccagttattaaaaccccttttgatttgttaaaacaccttgcggtctggcaactgcaagtgtcaaacaagaaatcaaaagggggtcccaatggggaacgaaaagagcttagcgcacacccgatggaactgtaaatatcacatagtatttgcgccaaaataccgaagacaggtgttctacagagagaagcgtagagcaataggctgtattttgagaaagctgtgtgagtggaaaagtgtacggattctggaagctgaatgctgtgcac

SEQ ID NO: 205 - DNA, 275 bp, Escherichia coli
ttcaccaaatgttttgcacgccacctgccaggcgaagcgcgccatctcctcgtcatttactaataccggtgtaccgttaacatgcgtaacctcagccgtagcgccaaagctggcagcctgggcttgtgcaagagcaggaatacgggtcagaggaagttgtcgggtatcgcggctaagagagcggacactgattttcatctcagcactgtcaggaatgacgttagccgcctcacccgcaacaatgctgccgacggtaattaccgccgcttccagcg

SEQ ID NO: 206 - DNA, 255 bp, Escherichia coli
cgtggataccgagttgaactgggcgacatcgaaagcctactgaaacagcatccggatattgctgatgcgtgggtcgatgtgcgacgcaatgcggcggcaacgccgctactagtggccttctattgcagcgtcaacggcgttgcgctggatgctcagcaattgcgcgtatggctcagcctgcggcttccgttgcatatgctgccgttgctctacgtgccgctgagcgccatgccgctaggtgtaaacggcaaaatc

SEQ ID NO: 207 - DNA, 239 bp, Escherichia coli
atctgactctttttcaaaccagtttttaaatgtaataccatttttgtggccaatagaaagaacattaccttcagctttatacataatgaggtcattcccttctcgcttaaaggcaacgtcccggaaatctatatcagctaaactgagtttatcgtctttccccccttcatcgtcaataatatgatggccatatcctgaaagataacgataaatatcattaccatatccacctttcagaa

SEQ ID NO: 208 - DNA, 263 bp, Escherichia coli
gccgaacaatacaacacccgctgctggaggtagtgaaaaatctgccctctccgactgttgtgtcaggtgataaattcgatactgtctgggataccgtctgcgaatggggcaacgtcaccacgttagtacatactaccgatgtaatactcgaatttagcggcgaactgccttcgggtttccatcgccacggctatttcaacctacgcggaaagcacggcatgtccgggcatatcaaagcagaaaactgcacgcatattgccttc

SEQ ID NO: 209 - DNA, 242 bp, Escherichia coli
gggacgtgcaaactgaacggagtggagccagaaagctacctccgctatgtccttgacgtcatagccgactggccgataaaccgggtcggcgaactgctcccctggcgcgtagcactgccgactgaataacacatccccgtcaatacggttcttgctgcacgcttacttagctccttctgatgccattctatttcaggaaggagtgtccgttaaactcaggctacctcactactgtacagcct

SEQ ID NO: 210 - DNA, 188 bp, Escherichia coli
gcggcctcgtttaagcaagcggctgatggtagtgcgataaatacccagttcgcgcgcaatttgcgcctgcgtcatatcctgttcgtaatagagttgggcaatcttcacaatcaaacggatatcgtcactgttttccattgccgcctcctggttctgcacatttgtgcaaatacgctttctcaccgctt

SEQ ID NO: 211 - DNA, 439 bp, Escherichia coli
gaactcgtgattaccaacagacaccgcatcaaagggcatagtgttcatgatatcaataatagcttcacctttggtcagggtgctgatatacggcccggtaaaatagtcgcctgcatcaaagaaaaacacatctttgctttttttcttcgcttcattaacgatgcctgcaatattagccataccacctataagtctgttcttatcaacagcgaggatttttgccggattgacatgtgcgtgaatgtcattcgtataataaatagtaacgtcctgagctagaacactgtgagaaaatatcacgccgaatatgactgataatgttgtaaatacagttttcatcatccctcctggatagggtgtgttacatttgttgaattatttaaataaaaggcacgtcgtgtcttattttatgtaagcatagttcagaaaagtattgtgt

SEQ ID NO: 212 - DNA, 324 bp, Escherichia coli
acatcatcaaatggcaagaagtggatttgaagttcagaaagtcaccgtagaggcattatttctacgagaaatacgaacacgctttggtaagtttcgtctggggtatttgtgggcgattcttgaaccctccgcgcatttgctgatactgttgggaattttgggttacgttatgcaccgcactatgccagacatctcgttcccggtgtttttacttaatggcctgattcccttttttatctttagtagtattagcaaacgttctattggtgctattgaagcgaaccagggactgtttaattatcgaccagtaaaacccatcgatac

SEQ ID NO: 213 - DNA, 85 bp, Escherichia coli
tggtgagcatgtttctgcgctccaacctgcaacaggcatcctttaactttgaacgtattcacgggctgggtttttgctacgacat

SEQ ID NO: 214 - DNA, 431 bp, Escherichia coli
atgtgttggcgcacaaatcaacggggattactgtcgtttaatgtgatttaaactgtgaaatagtatggttttcagttatggaaacgccgggagcggggaaaacttgctttttcccgtttccggggttggacaactgagcaacgcgaaggcgtcagctacgatgttccggtgactgctgaacagcccctgttgtattcagccattctccggtcatctgcagcagttttctggcatcgtggcttctgagcaacggaataccagcctgcctcagaacctcttccagaagaatatcccggcgtctgcgttccggtcgtaaatggctggcatcatccagctctactgctgcaacaatactgaacgaacgccgctcaacgataaccacatcaacatgccactgagacaccatcctgaataactgccaccactggcgt

SEQ ID NO: 215 - DNA, 271 bp, Escherichia coli
gtgaccctgacctttaagggaacggaagaggcggccctcccgggccatctgaaggtaaccggagtgaatgccggccggttaggcattgcactgctggacaccgatggtagcagtctgctgaaacccggcgcttcccataacaaaggccagggggaaaaggttaccggaaacagtcttgagcttcctttcggcgcgtatgttgtggcaacgccggaagccctgcggacgaagagtgtggtacccggtgattatgaagcaacagccacgtttg

SEQ ID NO: 216 - DNA, 216 bp, Escherichia coli
gtagtggaaagtcgatgtttaccggatgactgatgcgcgcttgtacacagacagtgtgtttcagtaatatggagaataatgaaatgaataacacagacacattagaaaaaataatcagacaccaaaaaaacaaagaccccgcatatccctttcgggaacatttgttgatgcagctctgtattcgcacaaataaaagaatgcaggataatatatctg

SEQ ID NO: 217 - DNA, 179 bp, Escherichia coli
taccttgcccctctttgttaagataaatagtaacatcacaatactcctttaaagctcgttcactatgtgacaccattattaaatgagatttttctcttattttatcgaatatatctgaacatttctttttaaactttgcgtctccaacagcagtgatttcatcaataagataatagtcg

SEQ ID NO: 218 - DNA, 212 bp, Escherichia coli
gtgaataatgcggtgctgcagacctccggtcagtgctgtcttcatgttcccgttacggaacaggacatgcggcagtcccagccggtgagtctgcaggtctcccgtggaacgccacagccagccccggttatctatggtgctgaggtagtcactccatgaatacgtgtaatccaccagggtatagccatacggcagactgacaccggcggcaa

SEQ ID NO: 219 - DNA, 229 bp, Escherichia coli
cagttgattatgaatcagtacggattattgagttgtcgcaaataatcacggagcttattgaagttgtttataacagaaaggtggacagaagttcatttaactattccagatttatgatgcaccttaaatatttttcaagtcgcgtgttatgcaatgaaaaaataaaacagaaagatattggtgatatctatgaacagtttcttgaaaaggacatcctgttacagcgcgc

SEQ ID NO: 220 - DNA, 215 bp, Escherichia coli
gctccagttgaggttttatagcaccatgctcaagacgtgccagctcaaaaagctgacaggacagatgcctcaccttgtgtccctgccggagagctgttgtcagatatttatgacagtcctctgatgatagcgaatccgacttcattgacagggtttccagatatcccagaagtgatgttaatggcgtccgtaaatcatgggagatattggcaata

SEQ ID NO: 221 - DNA, 319 bp, Escherichia coli
gatgcgaaaaatcagacgctgctgcgtaccatcccgttgaaagatccgagaccacaaatcacaagtgtgcagaatctggcggtggactccgcttctgaccgtgcctttgtggtggtattcgaccatgacgatcgttccggtacaaaagatggactctatatttttgacttacgcgacggtaaacagcttggctatgtgcacacaggagccggagctaacgcggtgaaatacaatccgaaatataacgaactgtatgtcaccaacttcactagcggcaccatcagcgtagtggatgccaccaaatacagcatcacccgtg

SEQ ID NO: 222 - DNA, 430 bp, Escherichia coli
cgatgtacaacattcggctgtatccgagaacagcaacgaacacgtgaagcggtgagcggccattacgcatagtgccccagtcaacctgcatctgtcgtccgggttcagtttcgaaccgaacggcaggctcctgctcctgaggaaccgagagagaacgaatgaatcccctgagaatggtcattccgccacgatatccctggtctctgatctcgcgagcgattaccgttgccgggattttgtaaggatgagcatcggcgatgcgttgacgaatataatcccggtattcatccaggagtgaagcaacagcaggtcgcggcgtatattttggcggctcagattttgcctgcaaataacgtttaacggtattgcgggagatccccagttctctggcaatcgcccggctactcattccctgcttgtgcaggatttt

SEQ ID NO: 223 - DNA, 267 bp, Escherichia coli
caggacacctcgaaatcctgttaatgttaaaacagtgagaatgaggtgatgcatgatcaaaactcgtcggactaaacgtaccttttccccggagttcaagcttgaagctttcgagcaggtggtggttaaataccagcgtgatgtcagagaagtcgcgcaggcactcgagctcaaccctgaccatttgcgtaaatggatacggttgtataagcaggaacttcagggtattgagccagctggtaatgctattacccctgaacaacgcga

SEQ ID NO: 224 - DNA, 232 bp, Escherichia coli
attcgcatgataacaccagaacttcagtcggtgcccgtctggcaatgtatgaagttggtttaaaaacatattctccaataggacaatcactggaaaaacgtgcggaaaaaatacatgaactagaagagaaagagcctagattaagtggtgctttaccctttgtagattctcatttgcataacgatctcatagatacgttatcaacgcgtggtattcctggagtagcattaac

SEQ ID NO: 225 - DNA, 245 bp, Escherichia coli
tccggaagtgatttcttcgtgaccggaatccggatacctttactgctttttatcccggtataaatccggtaaacctctgatgcgtaggcaagacgtctctggttctggcgttcggtcttcctgaatccggcattgtatgcaccaacggcctcccaggagacgccccattttttaaaggctattgccagataataagcaccggtataaatgttcatgcagggatctgttgtcagatgttccggttt

SEQ ID NO: 226 - DNA, 222 bp, Escherichia coli
tccccagtataggtgttcaatgttggaataccatttagccccactgtattatcatagaaatactgatcatagccatggttatcaaagcgatcttttttgatgtagaaaaagagaggttgttgctcatcagcattagcggcttcaaaatacggatagattgcacgctgacgtgtcgatgaaatacttccccgtcctttaagcacatcaatattaccgcgactt

SEQ ID NO: 227 - DNA, 217 bp, Escherichia coli
gaccgattaaactttatttctctgcccgcattagtctggagagaggatggacgtcattttattctgactaaagtcagtaaagaagcaaacagatatcttatttttgatctggggcagcgaaatccccgtgttctcgaacagtctgagtttgaggcgttatatcaggggcatattattcttatcgcttcccgttcttctgttgccgggaaactggcga

SEQ ID NO: 228 - DNA, 298 bp, Escherichia coli
tagatgcaatagaagaccagaaactgggactcgtttttaatgtcattgtttctgttgaagagaatgatttgtcaaccgggaataagcacattccattaagctcgggtatggctgtcactgcagaaataaagactggaatgcgaagcgtaatcagctatcttcttagtcctctggaagagtctgtaacagaaagtttacatgagcgttaagtctcagagccgcggtatccggctcatatcttctcctgtcatgtgtgactgcactgttttgtggcaaaccagtactgactatccactgg

SEQ ID NO: 229 - DNA, 267 bp, Escherichia coli
tcagcagcctgactgagctgaaaaaatatcgcaaaagccacccggaaaagatggccttcagctatagctacgcgctcagccggggtgtggatacgcagttccgccatatcaacattgcggaagccgatcacttcaaacagttcctgcgtcagattaagcgtgccggcctcgatatccgggcgatctgctgaccggatgtgatgaatatccctcctgattgttgcaatgttgttaatggggatcgggagggatgatattaagcggaaa

SEQ ID NO: 230 - DNA, 190 bp, Escherichia coli
gagttatgcacgcaagcactatccatcagaaccgcaaacactgattcattatctcaatgccgccgatgcagcatttgatacgttaatggcactgagtggcggtcacggcttcgatgatattttcgtctttgtgcctaatgaaggactggtgactctcgcctcttccttgctggcgacagatggttgtctg

SEQ ID NO: 231 - DNA, 285 bp, Escherichia coli
ttctgacaggacaggcactaacatctgttctggacttattattttcattcatattttttgcggtaatgtggtattacagtccaaagcttactctggtggtcttattttcgctgccttgttatgctgcatggtctgtttttattagccccattttgcgacgtcgccttgatgataagttttcacggaatgcagataatcaatctttcctggtggaatcagtcacggcgattaacactataaaagctatggcagtctcacctcagatgacgaacatatgggacaaac

SEQ ID NO: 232 - DNA, 238 bp, Escherichia coli
cagttcgacagactggatttcactaacttctacgaagacctgatgaataaccagaaaatcccggacagtggcgttctgacgcagaaagtgaaagagcagattgctgaccagctgaaacaggcaggacagtaaggtatggaaaataaccgggggaaatgatgaaagtcatattcacgtcgaaccgttttattgattttcttatccggcttttgattacagcgattgtcatttccccggt

SEQ ID NO: 233 - DNA, 323 bp, Escherichia coli
aaaaacaatggtatgaaaaagattcttttcatgttttttcctgattagggtgctgtatacacagaacaggaacgagctgagattgcatatcatctttattgtgtgcaacatgatatacaaatgaacatctgtctttattatctggtccccatacaacgctgagatgacctttttcagggagtcccctggtaaataccttcccggcctgagcgacatatccggccaactgtccatgttcatccagaacttcagaagccattggagggggattgccagtagacatacgaatatcaaataacagacttcttcctgttttagtgtca

SEQ ID NO: 234 - DNA, 283 bp, Escherichia coli
tcactataagtcagcccaccacttaaatgacgagcaaggtcccggtgtgacatctctgcaagccaggtgcgaacgtcagtagcaaacgtagggccgagtcggtaatctgatatttgtgtttccagtaaccagcttttggcttccgggatatccaatgtttgtgctagtaaatcagtgagtaacagaacttctatcccttgctggcgcagcgtattggcgaaaatatcatgctcttcacctgcccgctcaacggacaatacatcgtcaaataacaactcctggc

SEQ ID NO: 235 - DNA, 258 bp, Escherichia coli
gatggagatcatcatgcaggactatgacttttacgtctcctccggcggtggtgtcactattgggggcggtgagatgagcttgcaaactgattttgccgttgccctgttcagtgaatgcaaaaagatgatgatcaacgccgccgtcgagacccagggtacaaccccgcttgcaaactatcagaagctggctccggtcaccgacaccttcctgttcgatatcaaacagatcgatagcaatcaccataaaacgctgttcgg

SEQ ID NO: 236 - DNA, 178 bp, Escherichia coli
ttcgcacctgatgtgccctgacgcagggcggcaacattatccgttgtcaccgttgccttagtacgctctgcaatctgtacatccgtgatcatggtatagttcacatcttccaccatcgcatctgcagccatacccaccagaccagcagcaaggcctacaccgagtgtggcaccggcag

SEQ ID NO: 237 - DNA, 223 bp, Escherichia coli
gaatctgcactctgatgtaacttttatctgtttcagtgaagtatgcccacagattgagttattaagttgtggaagaacagctctgtcccgcctgcatctctcctttcagaaaccagtatgttgccatgcctcgccttaatggagagcgctgaaccataccttctttttccagtaataacaggtaatagcgtgcctgataatccgttaccgccagcgcctccgc

SEQ ID NO: 238 - DNA, 279 bp, Escherichia coli
ccagaacgtcccactcttccccggtgtttttttccctcccggcaacaagaatcgtgtacgacgcggtgttaacgtggatatttcgggtactcatcctgctttctcctctctctggttttcagcccccatcatctgttgagtttcgggagccgcggttttgacgttttgcggggacctgccttttgttccctccggtattcaccatcacctgtttgagaaccttcgccgcaaggggcatcactgccacggcctgacgcacctgtcctgggcagaacgcaa

SEQ ID NO: 239 - DNA, 269 bp, Escherichia coli
caactaggtgaaaagcctggtagtgtgtttaatattggttctcttggtgcagaaaatgctctttcattgcatttaccaaataagcaggagttggaactaaaatatggttcactgttaaaacggtactttgttgtagtattccatcctgaaacactttccacgcagtcggttaatgatcaaatagatgagttattgtcagcgatttctttttttaaaaatactcacgactttatttttattggcagtaacgctgacactggttctgatat

SEQ ID NO: 240 - DNA, 327 bp, Escherichia coli
gcatggacgccggggagcagtcgtattgatggtcatcagggcgaaaatattacctggtctctgtcatcgcagtctcctgccgataagtatgatctcatcaataaaacctcccgtgtttctcctgacagtggccgtttttatgaaccggacacagttctggatcaccgtgaacgggtacgcctttttattcagatccagtttccgcacgggagtgactggtctgaagtattgcgactgactgacattgttacagagaaggtctcttccggcagggctgcaggcgggtatcaccaccggcatacagggtacacctggtctgtttctgtg

SEQ ID NO: 241 - DNA, 221 bp, Escherichia coli
ttcgtgagttatcaatggtaatcatctgccccgatatttcggggcatttatctggaaggaagagagacaatgaaccactacacacgctggcttgagttaaaagaacaaaatcccggaaagtacgcgcgtgacatcgcaggtttaatgaatatcagcgaagcagaactggcatttgcacgcgtcacgcacgacgcgtggcggatgcgcggcgatattcgtga

SEQ ID NO: 242 - DNA, 180 bp, Escherichia coli
  misc_feature (51)..(51): unknown
cccgaaacgaagaagtgatgggtgatggtttcctttggtgttactgctgtnggtttgtttccaacagtaaacgtctgttgagcacatcctgtaataagcattgccagagcggcagaaaacaacatttttttcatcttattatcctgcattgttaaaaacggcagaatcctatgtgacaac

SEQ ID NO: 243 - DNA, 184 bp, Escherichia coli
tagtcaaatgccgacgactcatctgtataataaggtgcaagccttgctgcaagagcattcagccgtataagttgtcacgaacggtgcaatagtgatccacacccaacgcctgaaatcagatccagggggtaatctgctctcctgattcaggagagcttatggtcacttttgagacagttatgga

SEQ ID NO: 244 - DNA, 332 bp, Escherichia coli
ggaagatcggcatgtaagccggaaccgatgcccattaatgcaacaccaatagaagcgacagatccccatgatgccccggaaacataggacaatactgcgttcagaaaaaacgctatggcataaagccatgcgggcgcaaccagtaacataccgtaataaaccagcatcggcagtgtacctgcatagctccatgtcgcgaccataaagccaacgaaaataacgataagtaccggtgccatcaccgccgaaatcttatcgataataaacccctggatttcatcccaggtatatttcagcttagccattgcaataatgcaggaaaacgccgctga

SEQ ID NO: 245 - DNA, 299 bp, Escherichia coli
atcgttcaggagcagtgtcgtcagaagttataagtcataccaagcatgatgtcatgacttttaacatcaacttctgacttatatttatcgccccactcgtccttgtaactcacactgctgtcacctgcatcaagatagcgatagctgaggtccagagcgatatccggggttacgtcatagcggacacccgcgccaaggctccatgcgaagttgtcagcagagcctggacgtgacaacgattcgcgaccactgcttccgtactcataatcccaggtactgataccggttgttttctggtg

SEQ ID NO: 246 - DNA, 386 bp, Escherichia coli
gctcgcagtatcactggcctaccgtaaggttgagtgggagcacatcaaatccggtacttctggtgccgatgactggcgtgcaccgctggaagcataaatctgagtcaacaacatcctgcctccgtgcaggatgttgtttttgtacgtgtaaaaaatgagtgtcagtaaggagttacgctttcatgagggagatggtggatgccggaaacccgggcggtagcgtacctgaaaatgtaaagatgagtgtaacgctgcactggcaccctttgctgcatggtgggaatcatttggtccgtgaatgaatcagggaggtcattatgtccttaaaaggtcttcgctttacgctggaggttgacggccaggagccggacacctttgcagtggtg

SEQ ID NO: 247 - DNA, 239 bp, Escherichia coli
cgccagacatttaactatgaactggatggtaaaaaatacacgtatgatgaagttagcaaccaatctattcttacgactcatattgagtatcaatatacggatgttaacctgttagctgtgcatcacgctttactgaatagtggattagcgcctcagcctgtatcattgactgtgactttgcctatcagtgagttctatacgaaagagtgtcaaaaaaatgagctcaacattcagcgtaa

SEQ ID NO: 248 - DNA, 230 bp, Escherichia coli
tccctgcatatcccatccccagatacgggcccgggatacattataagaataagaacgcatccgtttcatatccacgcgcgtggcaatatagtttctggcatccgttccgaaatatccgcctttcaactgcagccgatcattgcctgtaagcaggccgtccagttgaatacctgcgccaatctcacgggtgatgttattttctggtttcagattaaggttaggaacccagt

SEQ ID NO: 249 - DNA, 360 bp, Escherichia coli
atttatgcaaggtaatgcactaaccgttttattatccggtaaaaaatatctgctattgcaggggccgatgggaccttttttcaatgacgtcgccgaatggttagagtcattaggccgtaacgctgtgaatgttgtattcaacggtggggatcgtttttactgccgtcatcgacaatacctggcttactaccaaacgccgaaagagtttcccggatggttacgggatctccatcggcaatatgactttgataccgtcctctgctttggtgactgccgcccattgcacaaagaagcaaaacgctgggcaaagtcgaaagggatcccgctttctggcatttgaggaaggatatttacgcccgc

SEQ ID NO: 250 - DNA, 287 bp, Escherichia coli
aatctgtaggtagttttcaccgttttgtacatagtggctgccgtcttctatgaccacgcctgcctgccgtgcgaaatgttgggttagctgcgttgcgctactctcatccgcgcttacgtctatccacgccagatacgacgattccggggtcatcatcttccacgccgggaagtaggtctggagggcatccgccagataccgggcgttgccttgcagataaccgttcagcgcgtcgagccagggcagaccgtgttgataggccagaatgattccccataccccgaaca

SEQ ID NO: 251 - DNA, 309 bp, Escherichia coli
atctattggccttgttatagttactcccttgtgctgttttgttagcgcaagagagtgtcagttctgcattttgatatattcaagtcaccatcctccaaaggcaaacaaatgagaaaaggtcatcaggcacaaacatccagtgaaaagctccccagtcttctcctgctggcttctgccccctactttgccacaatactctgtgcccctgtcggtcagtattctctacattggcaggtcatgcgactcataaaatggcagtacacgatcattcagcaggccagtcgctgtaatcgcattttggtgacatac

SEQ ID NO: 252 - DNA, 273 bp, Escherichia coli
ttctgatcatctgtattgctacattcggtcagattaatattgaaatcggtctggttgctcaccccctgtgcttctacgtcgataccagtgaaaaggttggaaggcacaaccggcaggacaacttcaatctgttttgaatcggttgcgaccttacaggtagctttcactacacggccagtaaagcggattttcccccccattgaatcaacgttgtcatccatatcagtgagcctgggataatcaacggtgctccagtcagtatccgccccacca

SEQ ID NO: 253 - DNA, 112 bp, Escherichia coli
tcaatatcaccccagttaacttcagcattttgtacagtacaggcaggaataatcagttttcctttaaaggtcagattatcagctgcatgtacatgctgagacattaacactg

SEQ ID NO: 254 - DNA, 384 bp, Escherichia coli
atgtcagttctgtatatccaaattcgtcgtaatcaaattactgttcgcgatcttgaaagcaaacgtgaagtgtcaggagacgctgccttcagtaaccagcgcctgttaatcgccaatttctttgttgcagaaaaagttctgcaagatcttgttctgcacctccacccacgttcaacctggcattcttttttgccagcaaaacgtatggatattgttgtgagcgcactggaaatgaatgagggcggtttgtcacaggttgaggaacgcattctccatgaagtggtcgctggggcaacgttaatgaaatatcgccagttccacatccatgcgcaatcagcggtactcagtgatagtgcggtcatggcaatgcttaagcagaaataa

SEQ ID NO: 255 - protein, 127 aa, Escherichia coli
MSVLYIQIRRNQITVRDLESKREVSGDAAFSNQRLLIANFFVAEKVLQDLVLQLHPRSTWHSFLPAKRMDIVVSALEMNEGGLSQVEERILHEVVAGATLMKYRQFHIHAQSAVLSDSAVMAMLKQK

SEQ ID NO: 256 - DNA, 1311 bp, Escherichia coli
atagtagttgtttttttaacatatctgattactcattaatcaattttttgatatgttctctaatctctaacaacctcataccataagagatgaatttataatcatctgtatcacgcgcaggcaaattattaattaaacaaataaaaaaacccaaatctcgttcaacaccacgattatatctaataccagccataatatactgctcattcgtcatatacagtgttgccgaagagggataatcaaaaagaacaagatctcttaaataagtagcagcaatttgaaaggtaaaatcatcctccattaggcatgtcgctaactctaactgatttctggtagttaattctgaagggtctagacctagagtaatcgctgcggttcgtatttgtatacccattgagccaaatgatgttttattttcaggcatatctaacaatccgatcattctttttgtttcatatatctgaaacttataattttcaggcatacctcctgactcaatccaggccacgccgcccagtaactctggacgaattccagcggcgtatgcatgtttaattattttgtctctattatattgtacatatgcatctttataagcatttaaataatatactcctgaacggcgacgcgaatcattttttcctaacttccagagtaaaacgtccatttcatcccatttacggaacttcgcttgtggaattgtacaatatctattttttatagtgagatcgcttttcatatttaaaaaatcctttcttcccaacaactatatgattccgtactcgcgatatggtgcttccatgttatatttttataattaagaacaatgacatcttccggctgattacccgcatgtgtaattgagtgtggataacatgtcagaatattcgataaatgtgctccttgcaattcaattgtgtaaaacctttcaatacaaccgccagaattaattctataaaaattaaatacagctgataactcttcattttcagaaagagcggcatttaataaaggggaggatttatctattggcttgtaaaattttatggggtgatgcactacattatactctcgacttaaagaatggtcgaactgtaaaacaaaaatttcatccacatgatttatttgatatttattaccaatagatgcatacgaaccacaaccctcagagatcaaaccttgtattttccctttaattgataagtatatcatatttgacatatatattctccataatcattttttccgaaaaactcctgtatcatttgcataatacatctctcctgtgggagcttatgggaagttgattta

SEQ ID NO: 257 - DNA, 477 bp, Escherichia coli
atgtcaaatatgatatacttatcaattaaagggaaaatacaaggtttgatctctgagggttgtggttcgtatgcatctattggtaataaatatcaaataaatcatgtggatgaaatttttgttttacagttcgaccattctttaagtcgagagtataatgtagtgcatcaccccataaaattttacaagccaatagataaatcctcccctttattaaatgccgctctttctgaaaatgaagagttatcagctgtatttaatttttatagaattaattctggcggttgtattgaaaggttttacacaattgaattgcaaggagcacatttatcgaatattctgacatgttatccacactcaattacacatgcgggtaatcagccggaagatgtcattgttcttaattataaaaatataacatggaagcaccatatcgcgagtacggaatcatatagttgttgggaagaaaggattttt

SEQ ID NO: 258 - protein, 159 aa, Escherichia coli
MSNMIYLSIKGKIQGLISEGCGSYASIGNKYQINHVDEIFVLQFDHSLSREYNVVHHPIKFYKPIDKSSPLLNAALSENEELSAVFNFYRINSGGCIERFYTIELQGAHLSNILTCYPHSITHAGNQPEDVIVLNYKNITWKHHIASTESYSCWEERIF

SEQ ID NO: 259 - DNA, 735 bp, Escherichia coli
ttgttgggaagaaaggattttttaaatatgaaaagcgatctcactataaaaaatagatattgtacaattccacaagcgaagttccgtaaatgggatgaaatggacgttttactctggaagttaggaaaaaatgattcgcgtcgccgttcaggagtatattatttaaatgcttataaagatgcatatgtacaatataatagagacaaaataattaaacatgcatacgccgctggaattcgtccagagttactgggcggcgtggcctggattgagtcaggaggtatgcctgaaaattataagtttcagatatatgaaacaaaaagaatgatcggattgttagatatgcctgaaaataaaacatcatttggctcaatgggtatacaaatacgaaccgcagcgattactctaggtctagacccttcagaattaactaccagaaatcagttagagttagcgacatgcctaatggaggatgattttacctttcaaattgctgctacttatttaagagatcttgttctttttgattatccctcttcggcaacactgtatatgacgaatgagcagtatattatggctggtattagatataatcgtggtgttgaacgagatttgggtttttttatttgtttaattaataatttgcctgcgcgtgatacagatgattataaattcatctcttatggtatgaggttgttagagattagagaacatatcaaaaaattgattaatgag

SEQ ID NO: 260 - protein, 245 aa, Escherichia coli
LLGRKDFLNMKSDLTIKNRYCTIPQAKFRKWDEMDVLLWKLGKNDSRRRSGVYYLNAYKDAYVQYNRDKIIKHAYAAGIRPELLGGVAWIESGGMPENYKFQIYETKRMIGLLDMPENKTSFGSMGIQIRTAAITLGLDPSELTTRNQLELATCLMEDDFTFQIAATYLRDLVLFDYPSSATLYMTNEQYIMAGIRYNRGVERDLGFFICLINNLPARDTDDYKFISYGMRLLEIREHIKKLINE

SEQ ID NO: 261 - DNA, 7315 bp, Escherichia coli
ggggctttgacatttctaaaaagaggccggtgctgctaccggtctcagcccagattagccattctttcttcccgttttcagtcctcgatggaaatcgttaattcgcttaatggttttaaccgcacgctgcggcactgcggaagctaccgaccagacaatcatttccagacacaacaataccgtaccatgtagcggcgttttccctttttcatccccgcgcggaacatgaatcacgatactggcgtctttgctaaaacgtgaatccagcgcgtttgtcagcaaaataacagggatccccagccgcctcgcctcacgaagcgttgtcagcccttcccggtgcgcagatttttgcgccatcatgatcagaacatcgccacgttgaagcgcgatcagttgctcggcaaggccaatacccgtacggtttagtgccgtggcaggcaaacctatgcggttgaatagtcgtgcggtatagtccgccagaatacccgaagcgccaataccaaaaatagcgacttgccgtgcctgcaccaacaacgctacagcttgcgcaagcgcgtggcggttttcaggctctgacaggacattacaggtatacaaatgcccttcaagaacaaagtcgattgcggtgttaacatcgctcgtcaagttactcaccgtcgtagacatcttttcgctggaactaagggctggaccaagccactgttccagagtgcgtttcagatcacgcagcccggcaaaccccagggcctgtatagccctgataactgtggcatcggaagtgttcaacgtggccgcaatttccatcgccgtttgctcgagtaccacttcacgatgctcattaatgtagctggcgacaactcttaacccaggcgttaactgactcgcgcgagtgcgaaaacgctcaccaaaaatatcaacccgcactttatctttctggatcatttatcttccggtagaggtcgccctgcaatttgtgattgtatctgcgcagccatcagccccagagatgcaaaggagttagaaattgcctcttcacgagaaatcagcacataacgcccggaacgacaggcagtcagaaactgacaccatcccggcatgactttttccattgctgccagctcatcctgaggtttaccaccggtgtcaccgcgccaggttgcaaaaacaaaatcggcatccagttcaggtaaacgctccgcgctcacatccattcgcccaccttcaggaatgctctcaatcagcggcggaaaacgaaaaccagcatcgcgtaatacccgtcccagcgaatgatagctatgcatcacattaatttttccctggtttgcctgaatcaccgataccgttattttttggctgtccagcgtcgccttcagcgcattgatttgtgcctgatagcggcgttcaagtatcgccagctgcgactgcgttcctgtaagttctgccagcttgcgatagatttctggcgcgccccctttgagatgatcaatgctcaccgtgggcgcaattttttcaagttgttcaatgggcgtattacgggtcggttctgtgatgatcaggtcaggctttgccgccacaatcgcttcaatatcaatatcagcggtaccaataaaggcgatcgatgaattatcaaagtcgacacctgtcaataacgcgccagatcgaatgaaatggctaccgtcaggccgagttcgcccgtggctggcgacaggaggtacaccgagctcaatcagaggaatagtgatatcaagatcgtgtaaagagacaattctctttggatgagcaggaacagtgactttgcgccctaaatcatcagtaaatacctgaacaggttctgttgcacgggaaaaaaatgacaacagtatcagcagagaaaaaaataaacgcatataactcccgttaaaaactgttcctgcgctgccagagcagtagcaaaaaaaatggtccaccaatcagtgagataatgattccggcaggcagttgcaaaggcaaaaaagccaaacgaccaatgctatccgccagaataactaacaacgcccccgataccgcgctccccagcagtaatgtcgtctgcccgccacgtagaataaaacgtgatatatggggtgctatcaatccgacaaaaccgatgttaccaacacacgaaacgcagacggctgtcaggattatgggtgcggcgacacgtaacaacgccagacgagaactattcacccctaacccggttgcaacctgatgaccaagcagagcgatatccgcagtcctggcggtgaacagcaataaaagagcggctggcaacatccaacaggctgaaataccgactaacatccagttagctgcatgcaggcttccctgataaccacatcaatgcagtttgtacatctcgaacatctgcagtggtcataaatacaccgataccggcggcgaaaaaccaggaaacaccaataccaatcagaacaaatcgcgggcgggaaatatcgcgcgcacaaaaaatcacgattaaagccaccaacaggccaccagcaagaccagccactggacgccagaacattcccagcattggaaactggaaaatcagccacagcacagccacgctacatccttctttgacgccgattaaaccaggatcggcaaggccattacgtgcaatggattgcattgcggcccccgccatacctaacatggccccgcatagcaatgccatgatgactctcggcaagcgaatatcctgcacaatataacgtgcgtctgtgcttacgttttctggagcaaacaacgctcgtcctacttccgatgccggaacaaagaaagaaccctgcatcagaccgaatatcagtattccaaccgcaaacagaaacaacccaccaagcaacaccagatttttagggcgtaccagtgtcgaaaacttaccaacacgtagtggtcgtagcccgacgttcattatccgactcatttgaacatcctcgtcgccataatgacaaaaacgggcgcaccaactaacgccgtcatgacaccggtcgctaactcatggggcgtgaaaagcgtccgggcaataatatctgccagtaataacaaaagtgcgccgacacaagctgaaagagggagcagaacgcgcagatccgctgataccagacgccggacaatctgcggtactagcaggccgacaaaaccaatggggccagcaatcgatacggctgcgccacagagcaacgcgatcgcaagcagggtaaatgttcgcgtgcggagtacagagacgcccagcccctgcgccatgcgatcgcccagtgccaacatgttaagggagggtgcaaggtaaagggctaacacaaatccccccagagaaaaccaggcggacgtacccagcgtcgcccaatcctgccccgctaaatcacctgctagccatgtccgcatcgccagcagtgtttgttcgtcaagaatcaggattgcagccgttattgaggacacgaacgccgatagcgccacgccgcataaagtaactttcattggcgttacccctgaacgccctgcggaggaaagcagcaatatcaacaggaacaataacgcgccccccgtagatgccagcagtgggcgtccaaccggaaaggccagtccaagcgcactggcggcaacgacagcaagagcggctccggcatttaagcctaaaatatgtggctcccccaatgggttacgaatgacagcctgcaacaaagcaccagcaacaccaagagaagcaccggtaagcaatgctgccgctaaacgcggcaaacggagtcttacaattacgttgtgatcgaagttttgcggatcaaaatgaagaaatgcctgcaacaccgtttgtggtgcaataaatcgggcaccaatccctggatataccacgcatcccaccagcagtaaggcgaggaaaattacagtaaccagccctgtgcgcatcatactttttctacaccacgaaacggcatgaagaacggctttcccgtcagaggatttattgatgcgtgaacatcaacgtcaaagaccgcttttaccagttcaggcgtgcaatgctccccctcattcaacacacgcaccactttcccctggcgtaaaaatatcaacgtatcgccataattgacggcaaaattcagatcatgcaacaccacgacgactgtacgcccgtgatgacgcgttaaatcatgtaataactcaagaatttcaacctgataacgtaaatcaagccaggttgtgggttcatccagcaggatataaggcgtcttttgcgccaacaccatcgcaatccagcaacgctggcgctgcccaccagagagtttttcaacaggtaaatgtgcaaactcctgcgtaccggttaatttcagggcatcttccaccgcctgctcatcggcgtcgctccattgacgtatgaaattttgccagggaaaacgcccacgcgacaccagttcataaacggttaagccctccggcaataatggcgactgcggcaagatcccaagtctacgggataacgctttcgttggttgctcgtgaatcgctttgccatcaagcaatatcgaaccgcccataggttgcaagatacgtgcaatggtgctgagcaacgtcgactttccacagccgtttgccccaaccagaacggtcattttttctgtgggaacggagaaagaaacaccatcaacaatgatcttcttgtgatacccggcagaaacattgtcgaggatcagcccctgcccttttgcgttatgtgccacgtgtacgccaacttaatcaaagacaaacaaaaataaaactcattctcctttgagagtttgacgccacaaaatgtagtagtcaagcagttaaaagccacacaaaaacaaggtaaataacaggtaaactatttttatacataaaaataaaaacattaaatatcaataaattaaaagcaatcaaattgtataaacttttcataaaaacacatgtagcaattttttgttatttctcatttactactacattactgcgtgattgaatgattctcaattacatatccgatggcgaaataacaaacggatagtgcttagtgagcaataagaaacaattttcactcgcgacaatccgcgagtttttgggataacagactaaatggctatgttcacaccttcattctcaggactcaaaggtcgggcgctcttttcactgctttttgcggcaccgatgattcatgcaacagactctgtaacgaccaaagatggcgaaacaatcactgttacagcagatgcaaataccgcaactgaggcaaccgatggttatcaacctctgagcacctccacggcgacattaaccgatatgccgatgctggatatcccgcaggtggtcaatacggttagcgatcaggttctggaaaaccagaatgcgacaacgctggatgaggcgctttataacgtcagtaacgtggtacagaccaatacattaggcgggactcaggatgcttttgtacgccgtgggtttggcgcaaaccgggatggctccatcatgaccaacggtctgcgaaccgtacttcctcgtagtttcaacgccgcaacagagcgtgtggaagtgctaaaaggcccggcctccacgctgtatggcattctcgatcctggcggactgattaacgtcgtgaccaagcgcccggaaaaaacattccatggttcggtttcagccacctcctccagttttggtggcggcactgggcaacttgatatcacaggtcccattgaaggcactcagctggcgtatcgccttaccggggaagtgcaggatgaagattactggcgaaacttcggtaaagagcgcagtacatttattgccccgtcactcacctggtttggtgataatgcaacagtaaccatgctctattcccatcgggactataaaactccattcgatcgtggaacgattttcgaccttacgacgaaacagcccgtaaacgttgatcgaaaaatacgttttgacgaaccgtttaatattacagatggtcagtccgatctggcgcaactcaacgcagaatatcatctcaatagccagtggacagcgcgctttgattacagctacagccaggataaatacagcgataatcaggcgcgtgttaccgcgtatgatgcaacgacaggaacactgacacggcgtgttgatgcaactcagggatctacccagcgtatgcatgctactcgtgcggatctgcaagggaatgttgatattgccggattctataatgagattctgggtggggtgtcatatgaatattatgatcttctgcgtacagatatgattcgctgtaaaaaagctaaagatttcaatatatacaaccctgtttatggtaataccagcaaatgtacaacggtttcggcgtcggacagcgatcagacgatcaaacaggagaactactcagcttatgcacaggacgcgctctatctgaccgataactggattgccgtcgccgggatccgctatcagtattacacgcaatatgcgggtaaaggccgtccttttaatgtcaatactgacagccgcgatgaacaatggacgcccaaactggggttagtctacaaactgacgccatcggtatccttatttgccaattattcgcaaacatttatgccgcagtcgtcaattgccagctacattggcgatcttccaccagaatcatctaatgcttacgaagtcggggcaaaattcgagctattcgatggtatcaccgcagatattgcgctgtttgatatccataaacgtaatgtgttgtataccgaaagtattggtgatgaaaccatcgccaaaacggcaggccgcgttcgttcaagaggggtagaagtcgaccttgcgggagcattaactgaaaacattaatatcattgccagctacggctataccgatgcaaaggttctggaagatcctgattatgcagggaaaccattgccgaatgttcctcgtcataccggttcgctattcctgacctatgatattcataacatgccaggcaataacacactgacgtttggcggtggcggacatggtgtaagccgtcgttcggcaaccaatggggctgactattatctgcctggctatttcgttgccgatgccttcgccgcatacaaaatgaaattgcagtatccggtcactctgcaattaaacgtcaaaaacctgtttgataaaacgtattacacctcttccatcgccacaaataatctgggcaaccagattggcgatccgcgtgaagtgcaattcacggtgaaaatggaattttgatcaaaaaagcccggtatacacttgtataccgggctatgttttattcttctggcgggaggattatcag

SEQ ID NO: 262 - DNA, 2139 bp, Escherichia coli
atggctatgttcacaccttcattctcaggactcaaaggtcgggcgctcttttcactgctttttgcggcaccgatgattcatgcaacagactctgtaacgaccaaagatggcgaaacaatcactgttacagcagatgcaaataccgcaactgaggcaaccgatggttatcaacctctgagcacctccacggcgacattaaccgatatgccgatgctggatatcccgcaggtggtcaatacggttagcgatcaggttctggaaaaccagaatgcgacaacgctggatgaggcgctttataacgtcagtaacgtggtacagaccaatacattaggcgggactcaggatgcttttgtacgccgtgggtttggcgcaaaccgggatggctccatcatgaccaacggtctgcgaaccgtacttcctcgtagtttcaacgccgcaacagagcgtgtggaagtgctaaaaggcccggcctccacgctgtatggcattctcgatcctggcggactgattaacgtcgtgaccaagcgcccggaaaaaacattccatggttcggtttcagccacctcctccagttttggtggcggcactgggcaacttgatatcacaggtcccattgaaggcactcagctggcgtatcgccttaccggggaagtgcaggatgaagattactggcgaaacttcggtaaagagcgcagtacatttattgccccgtcactcacctggtttggtgataatgcaacagtaaccatgctctattcccatcgggactataaaactccattcgatcgtggaacgattttcgaccttacgacgaaacagcccgtaaacgttgatcgaaaaatacgttttgacgaaccgtttaatattacagatggtcagtccgatctggcgcaactcaacgcagaatatcatctcaatagccagtggacagcgcgctttgattacagctacagccaggataaatacagcgataatcaggcgcgtgttaccgcgtatgatgcaacgacaggaacactgacacggcgtgttgatgcaactcagggatctacccagcgtatgcatgctactcgtgcggatctgcaagggaatgttgatattgccggattctataatgagattctgggtggggtgtcatatgaatattatgatcttctgcgtacagatatgattcgctgtaaaaaagctaaagatttcaatatatacaaccctgtttatggtaataccagcaaatgtacaacggtttcggcgtcggacagcgatcagacgatcaaacaggagaactactcagcttatgcacaggacgcgctctatctgaccgataactggattgccgtcgccgggatccgctatcagtattacacgcaatatgcgggtaaaggccgtccttttaatgtcaatactgacagccgcgatgaacaatggacgcccaaactggggttagtctacaaactgacgccatcggtatccttatttgccaattattcgcaaacatttatgccgcagtcgtcaattgccagctacattggcgatcttccaccagaatcatctaatgcttacgaagtcggggcaaaattcgagctattcgatggtatcaccgcagatattgcgctgtttgatatccataaacgtaatgtgttgtataccgaaagtattggtgatgaaaccatcgccaaaacggcaggccgcgttcgttcaagaggggtagaagtcgaccttgcgggagcattaactgaaaacattaatatcattgccagctacggctataccgatgcaaaggttctggaagatcctgattatgcagggaaaccattgccgaatgttcctcgtcataccggttcgctattcctgacctatgatattcataacatgccaggcaataacacactgacgtttggcggtggcggacatggtgtaagccgtcgttcggcaaccaatggggctgactattatctgcctggctatttcgttgccgatgccttcgccgcatacaaaatgaaattgcagtatccggtcactctgcaattaaacgtcaaaaacctgtttgataaaacgtattacacctcttccatcgccacaaataatctgggcaaccagattggcgatccgcgtgaagtgcaattcacggtgaaaatggaattt

SEQ ID NO: 263 - protein, 713 aa, Escherichia coli
MAMFTPSFSGLKGRALFSLLFAAPMIHATDSVTTKDGETITVTADANTATEATDGYQPLSTSTATLTDMPMLDIPQVVNTVSDQVLENQNATTLDEALYNVSNVVQTNTLGGTQDAFVRRGFGANRDGSIMTNGLRTVLPRSFNAATERVEVLKGPASTLYGILDPGGLINVVTKRPEKTFHGSVSATSSSFGGGTGQLDITGPIEGTQLAYRLTGEVQDEDYWRNFGKERSTFIAPSLTWFGDNATVTMLYSHRDYKTPFDRGTIFDLTTKQPVNVDRKIRFDEPFNITDGQSDLAQLNAEYHLNSQWTARFDYSYSQDKYSDNQARVTAYDATTGTLTRRVDATQGSTQRMHATRADLQGNVDIAGFYNEILGGVSYEYYDLLRTDMIRCKKAKDFNIYNPVYGNTSKCTTVSASDSDQTIKQENYSAYAQDALYLTDNWIAVAGIRYQYYTQYAGKGRPFNVNTDSRDEQWTPKLGLVYKLTPSVSLFANYSQTFMPQSSIASYIGDLPPESSNAYEVGAKFELFDGITADIALFDIHKRNVLYTESIGDETIAKTAGRVRSRGVEVDLAGALTENINIIASYGYTDAKVLEDPDYAGKPLPNVPRHTGSLFLTYDIHNMPGNNTLTFGGGGHGVSRRSATNGADYYLPGYFVADAFAAYKMKLQYPVTLQLNVKNLFDKTYYTSSIATNNLGNQIGDPREVQFTVKMEF

SEQ ID NO: 264 - DNA, 807 bp, Escherichia coli
gtggcacataacgcaaaagggcaggggctgatcctcgacaatgtttctgccgggtatcacaagaagatcattgttgatggtgtttctttctccgttcccacagaaaaaatgaccgttctggttggggcaaacggctgtggaaagtcgacgttgctcagcaccattgcacgtatcttgcaacctatgggcggttcgatattgcttgatggcaaagcgattcacgagcaaccaacgaaagcgttatcccgtagacttgggatcttgccgcagtcgccattattgccggagggcttaaccgtttatgaactggtgtcgcgtgggcgttttccctggcaaaatttcatacgtcaatggagcgacgccgatgagcaggcggtggaagatgccctgaaattaaccggtacgcaggagtttgcacatttacctgttgaaaaactctctggtgggcagcgccagcgttgctggattgcgatggtgttggcgcaaaagacgccttatatcctgctggatgaacccacaacctggcttgatttacgttatcaggttgaaattcttgagttattacatgatttaacgcgtcatcacgggcgtacagtcgtcgtggtgttgcatgatctgaattttgccgtcaattatggcgatacgttgatatttttacgccaggggaaagtggtgcgtgtgttgaatgagggggagcattgcacgcctgaactggtaaaagcggtctttgacgttgatgttcacgcatcaataaatcctctgacgggaaagccgttcttcatgccgtttcgtggtgtagaaaaagta

SEQ ID NO: 265 - protein, 269 aa, Escherichia coli
VAHNAKGQGLILDNVSAGYHKKIIVDGVSFSVPTEKMTVLVGANGCGKSTLLSTIARILQPMGGSILLDGKAIHEQPTKALSRRLGILPQSPLLPEGLTVYELVSRGRFPWQNFIRQWSDADEQAVEDALKLTGTQEFAHLPVEKLSGGQRQRCWIAMVLAQKTPYILLDEPTTWLDLRYQVEILELLHDLTRHHGRTVVVVLHDLNFAVNYGDTLIFLRQGKVVRVLNEGEHCTPELVKAVFDVDVHASINPLTGKPFFMPFRGVEKV

SEQ ID NO: 266 - DNA, 981 bp, Escherichia coli
atgatgcgcacagggctggttactgtaattttcctcgccttactgctggtgggatgcgtggtatatccagggattggtgcccgatttattgcaccacaaacggtgttgcaggcatttcttcattttgatccgcaaaacttcgatcacaacgtaattgtaagactccgtttgccgcgtttagcggcagcattgcttaccggtgcttctcttggtgttgctggtgctttgttgcaggctgtcattcgtaacccattgggggagccacatattttaggcttaaatgccggagccgctcttgctgtcgttgccgccagtgcgcttggactggcctttccggttggacgcccactgctggcatctacggggggcgcgttattgttcctgttgatattgctgctttcctccgcagggcgttcaggggtaacgccaatgaaagttactttatgcggcgtggcgctatcggcgttcgtgtcctcaataacggctgcaatcctgattcttgacgaacaaacactgctggcgatgcggacatggctagcaggtgatttagcggggcaggattgggcgacgctgggtacgtccgcctggttttctctggggggatttgtgttagccctttaccttgcaccctcccttaacatgttggcactgggcgatcgcatggcgcaggggctgggcgtctctgtactccgcacgcgaacatttaccctgcttgcgatcgcgttgctctgtggcgcagccgtatcgattgctggccccattggttttgtcggcctgctagtaccgcagattgtccggcgtctggtatcagcggatctgcgcgttctgctccctctttcagcttgtgtcggcgcacttttgttattactggcagatattattgcccggacgcttttcacgccccatgagttagcgaccggtgtcatgacggcgttagttggtgcgcccgtttttgtcattatggcgacgaggatgttcaaa

SEQ ID NO: 267 - protein, 327 aa, Escherichia coli
MMRTGLVTVIFLALLLVGCVVYPGIGARFIAPQTVLQAFLHFDPQNFDHNVIVRLRLPRLAAALLTGASLGVAGALLQAVIRNPLGEPHILGLNAGAALAVVAASALGLAFPVGRPLLASTGGALLFLLILLLSSAGRSGVTPMKVTLCGVALSAFVSSITAAILILDEQTLLAMRTWLAGDLAGQDWATLGTSAWFSLGGFVLALYLAPSLNMLALGDRMAQGLGVSVLRTRTFTLLAIALLCGAAVSIAGPIGFVGLLVPQIVRRLVSADLRVLLPLSACVGALLLLLADIIARTLFTPHELATGVMTALVGAPVFVIMATRMFK

SEQ ID NO: 268 - DNA, 1047 bp, Escherichia coli
atgagtcggataatgaacgtcgggctacgaccactacgtgttggtaagttttcgacactggtacgccctaaaaatctggtgttgcttggtgggttgtttctgtttgcggttggaatactgatattcggtctgatgcagggttctttctttgttccggcatcggaagtaggacgagcgttgtttgctccagaaaacgtaagcacagacgcacgttatattgtgcaggatattcgcttgccgagagtcatcatggcattgctatgcggggccatgttaggtatggcgggggccgcaatgcaatccattgcacgtaatggccttgccgatcctggtttaatcggcgtcaaagaaggatgtagcgtggctgtgctgtggctgattttccagtttccaatgctgggaatgttctggcgtccagtggctggtcttgctggtggcctgttggtggctttaatcgtgattttttgtgcgcgcgatatttcccgcccgcgatttgttctgattggtattggtgtttcctggtttttcgccgccggtatcggtgtatttatgaccactgcagatgttcgagatgtacaaactgcattgatgtggttatcagggaagcctgcatgcagcaactggatgttagtcggtatttcagcctgttggatgttgccagccgctcttttattgctgttcaccgccaggactgcggatatcgctctgcttggtcatcaggttgcaaccgggttaggggtgaatagttctcgtctggcgttgttacgtgtcgccgcacccataatcctgacagccgtctgcgtttcgtgtgttggtaacatcggttttgtcggattgatagcaccccatatatcacgttttattctacgtggcgggcagacgacattactgctggggagcgcggtatcgggggcgttgttagttattctggcggatagcattggtcgtttggcttttttgcctttgcaactgcctgccggaatcattatctcactgattggtggaccattttttttgctactgctctggcagcgcaggaacagtttt

SEQ ID NO: 269 - protein, 349 aa, Escherichia coli
MSRIMNVGLRPLRVGKFSTLVRPKNLVLLGGLFLFAVGILIFGLMQGSFFVPASEVGRALFAPENVSTDARYIVQDIRLPRVIMALLCGAMLGMAGAAMQSIARNGLADPGLIGVKEGCSVAVLWLIFQFPMLGMFWRPVAGLAGGLLVALIVIFCARDISRPRFVLIGIGVSWFFAAGIGVFMTTADVRDVQTALMWLSGKPACSNWMLVGISACWMLPAALLLLFTARTADIALLGHQVATGLGVNSSRLALLRVAAPIILTAVCVSCVGNIGFVGLIAPHISRFILRGGQTTLLLGSAVSGALLVILADSIGRLAFLPLQLPAGIIISLIGGPFFLLLLWQRRNSF

SEQ ID NO: 270 - DNA, 1008 bp, Escherichia coli
ttggtggaccattttttttgctactgctctggcagcgcaggaacagtttttaacgggagttatatgcgtttatttttttctctgctgatactgttgtcatttttttcccgtgcaacagaacctgttcaggtatttactgatgatttagggcgcaaagtcactgttcctgctcatccaaagagaattgtctctttacacgatcttgatatcactattcctctgattgagctcggtgtacctcctgtcgccagccacgggcgaactcggcctgacggtagccatttcattcgatctggcgcgttattgacaggtgtcgactttgataattcatcgatcgcctttattggtaccgctgatattgatattgaagcgattgtggcggcaaagcctgacctgatcatcacagaaccgacccgtaatacgcccattgaacaacttgaaaaaattgcgcccacggtgagcattgatcatctcaaagggggcgcgccagaaatctatcgcaagctggcagaacttacaggaacgcagtcgcagctggcgatacttgaacgccgctatcaggcacaaatcaatgcgctgaaggcgacgctggacagccaaaaaataacggtatcggtgattcaggcaaaccagggaaaaattaatgtgatgcatagctatcattcgctgggacgggtattacgcgatgctggttttcgttttccgccgctgattgagagcattcctgaaggtgggcgaatggatgtgagcgcggagcgtttacctgaactggatgccgattttgtttttgcaacctggcgcggtgacaccggtggtaaacctcaggatgagctggcagcaatggaaaaagtcatgccgggatggtgtcagtttctgactgcctgtcgttccgggcgttatgtgctgatttctcgtgaagaggcaatttctaactcctttgcatctctggggctgatggctgcgcagatacaatcacaaattgcagggcgacctctaccggaagataaa

SEQ ID NO: 271 - protein, 336 aa, Escherichia coli
LVDHFFCYCSGSAGTVFNGSYMRLFFSLLILLSFFSRATEPVQVFTDDLGRKVTVPAHPKRIVSLHDLDITIPLIELGVPPVASHGRTRPDGSHFIRSGALLTGVDFDNSSIAFIGTADIDIEAIVAAKPDLIITEPTRNTPIEQLEKIAPTVSIDHLKGGAPEIYRKLAELTGTQSQLAILERRYQAQINALKATLDSQKITVSVIQANQGKINVMHSYHSLGRVLRDAGFRFPPLIESIPEGGRMDVSAERLPELDADFVFATWRGDTGGKPQDELAAMEKVMPGWCQFLTACRSGRYVLISREEAISNSFASLGLMAAQIQSQIAGRPLPEDK

SEQ ID NO: 272 - DNA, 885 bp, Escherichia coli
atgatccagaaagataaagtgcgggttgatatttttggtgagcgttttcgcactcgcgcgagtcagttaacgcctgggttaagagttgtcgccagctacattaatgagcatcgtgaagtggtactcgagcaaacggcgatggaaattgcggccacgttgaacacttccgatgccacagttatcagggctatacaggccctggggtttgccgggctgcgtgatctgaaacgcactctggaacagtggcttggtccagcccttagttccagcgaaaagatgtctacgacggtgagtaacttgacgagcgatgttaacaccgcaatcgactttgttcttgaagggcatttgtatacctgtaatgtcctgtcagagcctgaaaaccgccacgcgcttgcgcaagctgtagcgttgttggtgcaggcacggcaagtcgctatttttggtattggcgcttcgggtattctggcggactataccgcacgactattcaaccgcataggtttgcctgccacggcactaaaccgtacgggtattggccttgccgagcaactgatcgcgcttcaacgtggcgatgttctgatcatgatggcgcaaaaatctgcgcaccgggaagggctgacaacgcttcgtgaggcgaggcggctggggatccctgttattttgctgacaaacgcgctggattcacgttttagcaaagacgccagtatcgtgattcatgttccgcgcggggatgaaaaagggaaaacgccgctacatggtacggtattgttgtgtctggaaatgattgtctggtcggtagcttccgcagtgccgcagcgtgcggttaaaaccattaagcgaattaacgatttccatcgaggactgaaaacgggaagaaagaatggc

SEQ ID NO: 273 - protein, 295 aa, Escherichia coli
MIQKDKVRVDIFGERFRTRASQLTPGLRVVASYINEHREVVLEQTAMEIAATLNTSDATVIRAIQALGFAGLRDLKRTLEQWLGPALSSSEKMSTTVSNLTSDVNTAIDFVLEGHLYTCNVLSEPENRHALAQAVALLVQARQVAIFGIGASGILADYTARLFNRIGLPATALNRTGIGLAEQLIALQRGDVLIMMAQKSAHREGLTTLREARRLGIPVILLTNALDSRFSKDASIVIHVPRGDEKGKTPLHGTVLLCLEMIVWSVASAVPQRAVKTIKRINDFHRGLKTGRKNG

SEQ ID NO: 274 - DNA, 5205 bp, Escherichia coli
gctttatatcaaaataacgcttatttattgataattaagattaacctccgtcattaaaataatgagtaaataagtttcagtatcagaatttatcacgccccacaatcaccaatctgatccaccaccgtcagataccagtcactgtcataactgtaaagttgacttaaataaaataccagtccatcgttactctcttctggcgcagcgaccacacgcacggccccgtattccattcgacgcgctgcggcaatctgcgcatcagaaatagtattttgcggtgaaccaaacatctgcgtgaagaccaaactacggctgactttatggtgaacatcgctattgctaataaaatacccctgcttattccagccacgttcgcagttaaatttcgggatagctttcttattaaattcgtcatctcgcggaacatgttcccctgccgagggccatgggaaatactcgggaacaggttgcctgaaattaatttgcttaagattttcaacatccatcgaagcaccacggtggaaaagaacatacaaacccgtttttttatcaattaacgagttgattaattgggcatcttcttgctgaaagcccataatcacctttctggctgtttcctccagcgtacacccggcattggcgggtaaagaaaagaatatcagccccaccagcatcattcctttttttaacatcagcattgtttgcatcttctcatcatggggctcatattacaaatttaacaattttcaggataaaccttacaccatactgttaacctggccgggtaattcgctagctggaatacgaaaggtataccaggcataacgacagcgtttccacaggctggagaaatggagatgataaaggcaatctgcaataatttcgttatctggatataaagactcggcaaaatgtgtccagcgcgcactgagtttcatgttaaacagtttttcatcttctttgttaccatacaggcgcgacaaagtaatcattgcttcgagcgtacctttattcgcttcttcttgtacctgttggaggtgcaaatgagcaagtgagagttctttcacctcaaagatattaagtaaaaaaagcccccatgctttttcatgtccagcttcatgagccagaaataaattgtcaaggagatttttttcataaatagcccgtgtttctttagaaatttcttgtttatttagtgcctggtagcagatagcaatgctaaaataaatattttgtagatcttgttgatgttcgctataaccataattttttaccagtggataagataccgagctatggaaatttaggtcatcttgaagtattttaagtgcccgtcgaaaatactccaaagctgtagatggttcataaggtaattttgtattgtcttccttatccaaatattcaagagcaactaaatttaatgcggcaggaatatttctttgcttaccaattgtcgcaagcggaatgaaataatcagaaaggtcaaaccaactcaaatcttttattgccgaccgccaattatgattgtatttaatgtcactagctttttccagccaagcatcgccctgcccttcatctttttcaaaacccaaaataccctctcgctggaaaaaccccctataaataacaggtgtagcataagttgtattctgtgaattttggcagataaaattatatatccagaatgaatctggataataacttaatgcaaattttatcgcgtacgcagtgtaataattattgagcttcatgtcttccatcaccgctcgctgtatacagcaccacaacttatcgtgatcgttctgcttgttatagcaggcaagtaaccactctagggcattatggcgacattcctgaaattgtgcgtactgagcaatattctctgctaagtcgattgcatattgttgctcctcgggcgcaatgtcctcaatgctgacatctcggtaatcatcccaccaaagtaagagatccatatagtcatgttcttcggtagataagtgcttacaggttactgaatccagcaattcggaaatttctttatgcgaccctccccagcgtggcattcgaaatggtatatattcaacaaaaggataaaaagtgtgaggaaaaatagtcaggcaaacagaaagccaatatttttgcccaccatcatcatcatactcaggaagtatattggggcgaggcaaaacggggcatattgcatgctcaaacgaaagtccggaatacgccatcaacgcttccacttcttgcggggagcggcggtgataatttttcagtgcgatcattaatggtattcctgcgacactatcaccgttaaggtgtgccgccagccaggctggctgaccaaatacttttgagttggtgctggtaagtaatgcagccatccattgtcgtgggtcacaatcaattgctttaagtgtagcgatgaccatttgttcattacatgcaccagcacaaagccacattgcatgtgtggtatcatttgcccagccataactgcgatataaccatgcacggtgattccagtattgtgcttcggcaagccaggcatgtgtagaatgaggtcttgcttgctgccaggttttaatgagtcttaaaccttctgttccggcatcaactagcgtgttcatatcataaaaatagttgcacatttgggtccaggataaaaaatagcgcttttcagcctgacgagaagtgaaactctcctgtaatacctggttataaatttcatctagttcctgataacgtttttcttgtaacatataaggaatatttgcgatttgccattttctctcaagagtattaagtggcattttttggtcacacatcttttgcattgcactgagtaaacgagcatcctgttccatagatatccttttaattaggttcaaaaattttaaattcattccacggcaattttttccagttactggatggatctttcaaccatgcagtgacttcctttaaatcacggttcgcagtggcgacgggggtatcgtatatcattaaccatttttgtcgggcgcgaacataagcactggcataatcttcccatgaagcgaaacaatcttgtgctctttgagcattcagtaataacactatccaggcctggttttcatcgcaccagcctaaaccggcgatgcaacgagttaaaaaagcagtgcgcatacagtcaaacgccagcccatccagaacctggccttgtgctgccagttgttcgtaaaaatcatgtggagaattaccaagccctgtagcccagcgctgtaatataacgccaatttgttgacggaaatcttcgttgctttggtaagtttctgttcctagctcttgtttaacctgtagtgcaagttgttgacgcttatcatcagtcaactttaaatctaacgtgaagccatttactgacagtccattacgacgagcaactatatcaccaattgctaatgcccacttacgtctctttgttgctcgtcttttgtccttgattagatccttttctttttctttagcaataaaagcatcgatttgtggtttgttttttttgtatctatagataaaaataaatattgcgaccaggagaacaatgataagactcattatttttcaacctctgacaggggtaagtaatgagatgtctgtaatgtcaaactctctatctcaaaggaaatgttgctgatattttgacctgcaaattgcggatgccactcagcgccagggaataacatttccgcagaagtagcaactatagggtcaatagcattaagataatgtaacttatcaggtgcgctgtgtaacagtaaccactgcaactccactgaaggatttgtaaaatgttctaataaatgaaagttattatgtagtacgcttagtaaaaaactggtttcgtatacttccgttacatatttccacccctgatattcaggtgtattttcataaacaatacccataccttcacaatcactatgtcgaactgcttgtggtgataatagttgcaaaagagacaaaacatcgtccgcatattttttaactggatgacgattttgcttaccttttatttgatcaatttcaagtgaatcaccaacaacattgagagcaatagtaacatgaggaatattattattatcacgcaaactgaataaccgtaatttatgttgctcaatttgatttgcataatactcaccataaccaccggtaagattttttcgatcatcaaactggcctacgcaatgttgcatatgccatgattcataagccatttcacgacgaaagttcgaatgactggcatcaaactcaacaatttttccgtctggcacatcaagtattgactttacagtattttgttcactcggctgccaccctttctcgcgtcgttgaagcatcttttcatgctcttcttcacgcattctgaacgcaacgtagcaggttatgcgctgtagttttgattccagacgggtaccacatttcctggaaagaaattccaccaactcccgttctttggttaatatttgttgatgatcggtttcgatataataaagtgtcgcagttgatactgaggcagtattaaacttcgataccagccattccgggattacatcatcatttttattaaacagtgaatattctgcaagcgagttaatttgttgcaccattggaaagtcactaattagccatcgataaaaatggttgagtaaccatttttggatggtctcattatcctggcgaaacagacttctttgcaaaattgctgtttttacttccggggcattaattacatcccttgcattataattctggtgaatatttccagtcataacatccgcccgtgtttattatatcactcaaagcaataattgttgactatagattttttatctaaatcagcatggttgcaggtacatactcaagtaagccactcaagaaaataacgaaaactcaatagtggcagcgtcacaaactttggaaattatgtcttatatttgcagtttattttagtgaataattgagataaatgacattattttacatcctcaataattcaggctgtaagaggacggcaaatacattcataattatcaggggatgaacattcaggaaagtggtcagtatcgtcaactttttcttttatcactacatgaagatttcgtgtagatactcccatctctgccacttctcccctcacatttacactggagctaaacccgccgattg

SEQ ID NO: 275 - DNA, 612 bp, Escherichia coli
atgcaaacaatgctgatgttaaaaaaaggaatgatgctggtggggctgatattcttttctttacccgccaatgccgggtgtacgctggaggaaacagccagaaaggtgattatgggctttcagcaagaagatgcccaattaatcaactcgttaattgataaaaaaacgggtttgtatgttcttttccaccgtggtgcttcgatggatgttgaaaatcttaagcaaattaatttcaggcaacctgttcccgagtatttcccatggccctcggcaggggaacatgttccgcgagatgacgaatttaataagaaagctatcccgaaatttaactgcgaacgtggctggaataagcaggggtattttattagcaatagcgatgttcaccataaagtcagccgtagtttggtcttcacgcagatgtttggttcaccgcaaaatactatttctgatgcgcagattgccgcagcgcgtcgaatggaatacggggccgtgcgtgtggtcgctgcgccagaagagagtaacgatggactggtattttatttaagtcaactttacagttatgacagtgactggtatctgacggtggtggatcagattggtgattgtggggcg

SEQ ID NO: 276 - protein, 204 aa, Escherichia coli
MQTMLMLKKGMMLVGLIFFSLPANAGCTLEETARKVIMGFQQEDAQLINSLIDKKTGLYVLFHRGASMDVENLKQINFRQPVPEYFPWPSAGEHVPRDDEFNKKAIPKFNCERGWNKQGYFISNSDVHHKVSRSLVFTQMFGSPQNTISDAQIAAARRMEYGAVRVVAAPEESNDGLVFYLSQLYSYDSDWYLTVVDQIGDCGA

SEQ ID NO: 277 - DNA, 2145 bp, Escherichia coli
atgaatttaaaatttttgaacctaattaaaaggatatctatggaacaggatgctcgtttactcagtgcaatgcaaaagatgtgtgaccaaaaaatgccacttaatactcttgagagaaaatggcaaatcgcaaatattccttatatgttacaagaaaaacgttatcaggaactagatgaaatttataaccaggtattacaggagagtttcacttctcgtcaggctgaaaagcgctattttttatcctggacccaaatgtgcaactatttttatgatatgaacacgctagttgatgccggaacagaaggtttaagactcattaaaacctggcagcaagcaagacctcattctacacatgcctggcttgccgaagcacaatactggaatcaccgtgcatggttatatcgcagttatggctgggcaaatgataccacacatgcaatgtggctttgtgctggtgcatgtaatgaacaaatggtcatcgctacacttaaagcaattgattgtgacccacgacaatggatggctgcattacttaccagcaccaactcaaaagtatttggtcagccagcctggctggcggcacaccttaacggtgatagtgtcgcaggaataccattaatgatcgcactgaaaaattatcaccgccgctccccgcaagaagtggaagcgttgatggcgtattccggactttcgtttgagcatgcaatatgccccgttttgcctcgccccaatatacttcctgagtatgatgatgatggtgggcaaaaatattggctttctgtttgcctgactatttttcctcacactttttatccttttgttgaatatataccatttcgaatgccacgctggggagggtcgcataaagaaatttccgaattgctggattcagtaacctgtaagcacttatctaccgaagaacatgactatatggatctcttactttggtgggatgattaccgagatgtcagcattgaggacattgcgcccgaggagcaacaatatgcaatcgacttagcagagaatattgctcagtacgcacaatttcaggaatgtcgccataatgccctagagtggttacttgcctgctataacaagcagaacgatcacgataagttgtggtgctgtatacagcgagcggtgatggaagacatgaagctcaataattattacactgcgtacgcgataaaatttgcattaagttattatccagattcattctggatatataattttatctgccaaaattcacagaatacaacttatgctacacctgttatttatagggggtttttccagcgagagggtattttgggttttgaaaaagatgaagggcagggcgatgcttggctggaaaaagctagtgacattaaatacaatcataattggcggtcggcaataaaagatttgagttggtttgacctttctgattatttcattccgcttgcgacaattggtaagcaaagaaatattcctgccgcattaaatttagttgctcttgaatatttggataaggaagacaatacaaaattaccttatgaaccatctacagctttggagtattttcgacgggcacttaaaatacttcaagatgacctaaatttccatagctcggtatcttatccactggtaaaaaattatggttatagcgaacatcaacaagatctacaaaatatttattttagcattgctatctgctaccaggcactaaataaacaagaaatttctaaagaaacacgggctatttatgaaaaaaatctccttgacaatttatttctggctcatgaagctggacatgaaaaagcatgggggctttttttacttaatatctttgaggtgaaagaactctcacttgctcatttgcacctccaacaggtacaagaagaagcgaataaaggtacgctcgaagcaatgattactttgtcgcgcctgtatggtaacaaagaagatgaaaaactgtttaacatgaaactcagtgcgcgctggacacattttgccgagtctttatatccagataacgaaattattgcagattgcctttatcatctccatttctccagcctgtggaaacgctgtcgttatgcctggtatacctttcgtattccagctagcgaattacccggccaggttaacagtatggtg

SEQ ID NO: 278 - protein, 715 aa, Escherichia coli
MNLKFLNLIKRISMEQDARLLSAMQKMCDQKMPLNTLERKWQIANIPYMLQEKRYQELDEIYNQVLQESFTSRQAEKRYFLSWTQMCNYFYDMNTLVDAGTEGLRLIKTWQQARPHSTHAWLAEAQYWNHRAWLYRSYGWANDTTHAMWLCAGACNEQMVIATLKAIDCDPRQWMAALLTSTNSKVFGQPAWLAAHLNGDSVAGIPLMIALKNYHRRSPQEVEALMAYSGLSFEHAICPVLPRPNILPEYDDDGGQKYWLSVCLTIFPHTFYPFVEYIPFRMPRWGGSHKEISELLDSVTCKHLSTEEHDYMDLLLWWDDYRDVSIEDIAPEEQQYAIDLAENIAQYAQFQECRHNALEWLLACYNKQNDHDKLWCCIQRAVMEDMKLNNYYTAYAIKFALSYYPDSFWIYNFICQNSQNTTYATPVIYRGFFQREGILGFEKDEGQGDAWLEKASDIKYNHNWRSAIKDLSWFDLSDYFIPLATIGKQRNIPAALNLVALEYLDKEDNTKLPYEPSTALEYFRRALKILQDDLNFHSSVSYPLVKNYGYSEHQQDLQNIYFSIAICYQALNKQEISKETRAIYEKNLLDNLFLAHEAGHEKAWGLFLLNIFEVKELSLAHLHLQQVQEEANKGTLEAMITLSRLYGNKEDEKLFNMKLSARWTHFAESLYPDNEIIADCLYHLHFSSLWKRCRYAWYTFRIPASELPGQVNSMV

SEQ ID NO: 279 - DNA, 714 bp, Escherichia coli
atgagtcttatcattgttctcctggtcgcaatatttatttttatctatagatacaaaaaaaacaaaccacaaatcgatgcttttattgctaaagaaaaagaaaaggatctaatcaaggacaaaagacgagcaacaaagagacgtaagtgggcattagcaattggtgatatagttgctcgtcgtaatggactgtcagtaaatggcttcacgttagatttaaagttgactgatgataagcgtcaacaacttgcactacaggttaaacaagagctaggaacagaaacttaccaaagcaacgaagatttccgtcaacaaattggcgttatattacagcgctgggctacagggcttggtaattctccacatgatttttacgaacaactggcagcacaaggccaggttctggatgggctggcgtttgactgtatgcgcactgcttttttaactcgttgcatcgccggtttaggctggtgcgatgaaaaccaggcctggatagtgttattactgaatgctcaaagagcacaagattgtttcgcttcatgggaagattatgccagtgcttatgttcgcgcccgacaaaaatggttaatgatatacgatacccccgtcgccactgcgaaccgtgatttaaaggaagtcactgcatggttgaaagatccatccagtaactggaaaaaattgccgtggaatgaatttaaaatttttgaacctaat

SEQ ID NO: 280 - protein, 238 aa, Escherichia coli
MSLIIVLLVAIFIFIYRYKKNKPQIDAFIAKEKEKDLIKDKRRATKRRKWALAIGDIVARRNGLSVNGFTLDLKLTDDKRQQLALQVKQELGTETYQSNEDFRQQIGVILQRWATGLGNSPHDFYEQLAAQGQVLDGLAFDCMRTAFLTRCIAGLGWCDENQAWIVLLLNAQRAQDCFASWEDYASAYVRARQKWLMIYDTPVATANRDLKEVTAWLKDPSSNWKKLPWNEFKIFEPN

SEQ ID NO: 281 - DNA, 1212 bp, Escherichia coli
atgactggaaatattcaccagaattataatgcaagggatgtaattaatgccccggaagtaaaaacagcaattttgcaaagaagtctgtttcgccaggataatgagaccatccaaaaatggttactcaaccatttttatcgatggctaattagtgactttccaatggtgcaacaaattaactcgcttgcagaatattcactgtttaataaaaatgatgatgtaatcccggaatggctggtatcgaagtttaatactgcctcagtatcaactgcgacactttattatatcgaaaccgatcatcaacaaatattaaccaaagaacgggagttggtggaatttctttccaggaaatgtggtacccgtctggaatcaaaactacagcgcataacctgctacgttgcgttcagaatgcgtgaagaagagcatgaaaagatgcttcaacgacgcgagaaagggtggcagccgagtgaacaaaatactgtaaagtcaatacttgatgtgccagacggaaaaattgttgagtttgatgccagtcattcgaactttcgtcgtgaaatggcttatgaatcatggcatatgcaacattgcgtaggccagtttgatgatcgaaaaaatcttaccggtggttatggtgagtattatgcaaatcaaattgagcaacataaattacggttattcagtttgcgtgataataataatattcctcatgttactattgctctcaatgttgttggtgattcacttgaaattgatcaaataaaaggtaagcaaaatcgtcatccagttaaaaaatatgcggacgatgttttgtctcttttgcaactattatcaccacaagcagttcgacatagtgattgtgaaggtatgggtattgtttatgaaaatacacctgaatatcaggggtggaaatatgtaacggaagtatacgaaaccagttttttactaagcgtactacataataactttcatttattagaacattttacaaatccttcagtggagttgcagtggttactgttacacagcgcacctgataagttacattatcttaatgctattgaccctatagttgctacttctgcggaaatgttattccctggcgctgagtggcatccgcaatttgcaggtcaaaatatcagcaacatttcctttgagatagagagtttgacattacagacatctcattacttacccctgtcagaggttgaaaaa

SEQ ID NO: 282 - protein, 404 aa, Escherichia coli
MTGNIHQNYNARDVINAPEVKTAILQRSLFRQDNETIQKWLLNHFYRWLISDFPMVQQINSLAEYSLFNKNDDVIPEWLVSKFNTASVSTATLYYIETDHQQILTKERELVEFLSRKCGTRLESKLQRITCYVAFRMREEEHEKMLQRREKGWQPSEQNTVKSILDVPDGKIVEFDASHSNFRREMAYESWHMQHCVGQFDDRKNLTGGYGEYYANQIEQHKLRLFSLRDNNNIPHVTIALNVVGDSLEIDQIKGKQNRHPVKKYADDVLSLLQLLSPQAVRHSDCEGMGIVYENTPEYQGWKYVTEVYETSFLLSVLHNNFHLLEHFTNPSVELQWLLLHSAPDKLHYLNAIDPIVATSAEMLFPGAEWHPQFAGQNISNISFEIESLTLQTSHYLPLSEVEK

SEQ ID NO: 283 - DNA, 1585 bp, Escherichia coli
tattcgtctccagggagggacaatgtcttattcagaaatcgccgcgtgtctggcatacgcggtttccgtctggctggctgccagaaacaatgtgcatacatggtggatcggcataattggcagcatattgtacggctgggttttttggtccgtgcaactctatgccgacgttacgctccagttattcttcatcgcgaccagcatcactggctggatccactggctgaaaggtcagggtggcgacatcttgccggtgcgccgaacgcaagccagtcactttttccttttgttgctctgtgctgtcgtcgtggcaggcggttacggctttttactccacacctttaccaatgcctgggcaccctggctggattcgttgattttgacctttagcgttctggcacaattcatgttgatgggaagacgtatcgaaaactggttcgtctggttagcggtgaataccctggcagtgccactgtatatgacgcgcggtttaaacctgaccgctggcttatatttcctgttctggattaacgcctggcatggtttgtatcaatggcgcaaagagttgcaaacatcatgaagccttttgcaacgggcctggtggttggtaaattcgcgcctttgcattgtggtcatgaaaagttgatcaataccgcactggcgcaatgtgaagaactgttcatcatcagttattccgtgccggaaatgcctgactgtgaacctgaaaagcgcctgacgtggctgcaagtgcgcttcccgcaagcgacgattttggtactgacgccagagcttgttgcgcgttataacttacctgccataccgcataacgatgccgatgccgacatccaccgtcattatgtggcgacgctgtgcctgcagatattacgctgtcgtccacatgctgtatttactgcagaagactatggcgatggctttgctaacgtgctggcgcggcgttttgcccaacccgttgaacacgttcgaatggcgcgcccagttggcgatgaagcgccttcgggaacgcttattcgttccgatgttcaccgctatcgctacatgttggcgaatgatgtttattacagtttcgttcgccgtatctgtctgcttggtggcgaatctaccggtaaaagcacgctttcaaaagcgctggcggatgggcttgatacggtgtatgtcgctgaatttggccgcgactattgggaagaaaaaaacggaatcttaaccgcggatgatttgttgcatatcgcctgcgaacaggtacgccgggaacaacaagcagaagctaatcactatcttatatgtgacacgtcgccactcacgaccttgttctatgcccttgatcaatatggtcatgctccgcaagaacttcatcaactggcggagcgggaatactctctggtggtgctttgcggcgcagaatttcccttcgtgcaggatggcacccggcaaggagaggtatttcgcgcacggcaacaggtgtggtatgaacaggaattgtcgcgcaggaacattccttatctttcggtttcggggccactgcaagagcgagtggagcaaattcttcgccaacttcccgactgacttt

SEQ ID NO: 284 - DNA, 1002 bp, Escherichia coli
atgaagccttttgcaacgggcctggtggttggtaaattcgcgcctttgcattgtggtcatgaaaagttgatcaataccgcactggcgcaatgtgaagaactgttcatcatcagttattccgtgccggaaatgcctgactgtgaacctgaaaagcgcctgacgtggctgcaagtgcgcttcccgcaagcgacgattttggtactgacgccagagcttgttgcgcgttataacttacctgccataccgcataacgatgccgatgccgacatccaccgtcattatgtggcgacgctgtgcctgcagatattacgctgtcgtccacatgctgtatttactgcagaagactatggcgatggctttgctaacgtgctggcgcggcgttttgcccaacccgttgaacacgttcgaatggcgcgcccagttggcgatgaagcgccttcgggaacgcttattcgttccgatgttcaccgctatcgctacatgttggcgaatgatgtttattacagtttcgttcgccgtatctgtctgcttggtggcgaatctaccggtaaaagcacgctttcaaaagcgctggcggatgggcttgatacggtgtatgtcgctgaatttggccgcgactattgggaagaaaaaaacggaatcttaaccgcggatgatttgttgcatatcgcctgcgaacaggtacgccgggaacaacaagcagaagctaatcactatcttatatgtgacacgtcgccactcacgaccttgttctatgcccttgatcaatatggtcatgctccgcaagaacttcatcaactggcggagcgggaatactctctggtggtgctttgcggcgcagaatttcccttcgtgcaggatggcacccggcaaggagaggtatttcgcgcacggcaacaggtgtggtatgaacaggaattgtcgcgcaggaacattccttatctttcggtttcggggccactgcaagagcgagtggagcaaattcttcgccaacttcccgac

SEQ ID NO: 285 - protein, 342 aa, Escherichia coli
MAQRVANIMKPFATGLVVGKFAPLHCGHEKLINTALAQCEELFIISYSVPEMPDCEPEKRLTWLQVRFPQATILVLTPELVARYNLPAIPHNDADADIHRHYVATLCLQILRCRPHAVFTAEDYGDGFANVLARRFAQPVEHVRMARPVGDEAPSGTLIRSDVHRYRYMLANDVYYSFVRRICLLGGESTGKSTLSKALADGLDTVYVAEFGRDYWEEKNGILTADDLLHIACEQVRREQQAEANHYLICDTSPLTTLFYALDQYGHAPQELHQLAEREYSLVVLCGAEFPFVQDGTRQGEVFRARQQVWYEQELSRRNIPYLSVSGPLQERVEQILRQLPD

SEQ ID NO: 286 - DNA, 555 bp, Escherichia coli
atgtcttattcagaaatcgccgcgtgtctggcatacgcggtttccgtctggctggctgccagaaacaatgtgcatacatggtggatcggcataattggcagcatattgtacggctgggttttttggtccgtgcaactctatgccgacgttacgctccagttattcttcatcgcgaccagcatcactggctggatccactggctgaaaggtcagggtggcgacatcttgccggtgcgccgaacgcaagccagtcactttttccttttgttgctctgtgctgtcgtcgtggcaggcggttacggctttttactccacacctttaccaatgcctgggcaccctggctggattcgttgattttgacctttagcgttctggcacaattcatgttgatgggaagacgtatcgaaaactggttcgtctggttagcggtgaataccctggcagtgccactgtatatgacgcgcggtttaaacctgaccgctggcttatatttcctgttctggattaacgcctggcatggtttgtatcaatggcgcaaagagttgcaaacatca

SEQ ID NO: 287 - protein, 185 aa, Escherichia coli
MSYSEIAACLAYAVSVWLAARNNVHTWWIGIIGSILYGWVFWSVQLYADVTLQLFFIATSITGWIHWLKGQGGDILPVRRTQASHFFLLLLCAVVVAGGYGFLLHTFTNAWAPWLDSLILTFSVLAQFMLMGRRIENWFVWLAVNTLAVPLYMTRGLNLTAGLYFLFWINAWHGLYQWRKELQTS

SEQ ID NO: 288 - DNA, 2443 bp, Escherichia coli
gggcgttttacttgactgaaaaggttttcaatctgaaaaccttttctgggccctggtccggagttaccttcccgctctccaggcaacatcccgtagcgccgatcgcgcagcctcactgataccacctaactgaaaaaatccgtggataacgccaaggtagcgttggcaggtgcattgcactccttgccctgtcatgcggtgatacaacgcttcaccttcatcgcaaagtgggtcgattcagcggtaatgatatgacaggtggcaagccattgaaatcattgcgccaaatagggctggcttcagatgcctgcgttcaatgcctggcaggtacatctcaaagccgctcagtaaagtgtcgcgtgtgatgatgtaatcgtgaccattgcgtatgtagctttcgaaatgcccagtcgcatcaagcataggataattaagatgagttgtgctggttgccacagccagcacgctcaatcgcaaagcagttaccagcgccagatgcccgcccgcactgtcaccggcaagagttattcgttgtttatcaacgccgagtcgttcggcgtgttgccggactaattctgcacctcgttgtgcatcatcatgggcggcggggaaagtatgttccggtgccagccgatactggacggcaataatccgacattgcccgtaataggctaactggcgcagctggttgtcgtgagttgcgaacccgccgctaacaaaacagccaccgtagtaataaattatcgtcgggagtaatgtcggggcattcagcggtgacactattcgtaaggtcatcccttcaagttcgatagtctgaatatctacccgcgtttctgtctcacccgcaaggacagcgctggcgatatagccctctctgcgctgcgtaatactttgttggcgcgatgaggggcgacccgcagcgataaactcttcgactaactctgcaattcctttttccagtgccatagtagaactcatttttgctgtatgaatgtacagttttatacacccgtttttgctggatggatacagggaaattcacgggcgtgaaaaatctggaaagcgcctcgcaaatgtaaagacaaacccggcagagacgtggttttgctggagcactatcagtaagctagtggtttcaatggtacgtcaatgacgtacaaaaaggattgttactctaagccaatggcgtataattatgctcttcatcgaaacggaaatttttactgaagatgttcaaaaactgctgaacgacgatgaattcagtcgttttcagtttttcctggccttgaatcctgactatggtgaggtaatacctgaaactggtgggttaagaaaggttcgatgggtctcaggaggaaaggggaaacgtgctggtgtcagggttatttactttcatcaggttaaacattatgagatcagattactgcttatttatcgtaagggtattaaagatgatctgtctccccaggaaaaagcaatgctccggttgttaaatacgaggtggtaaatggataaggcactttttgagcggttgactcacagcatggcccagatgaatgaaattattgaaggaacgcgacagccttcacggacttttgaagttgatgctatgaaaatcaaagaaatacgccgcgcttcagggttgtcacaatctaaatttgccgatcttatttccgtaagcgtagacacgttgcgtaactgggagcaggggcgacgttcaccgaccgggcctgcaaaggctttgctgcgagcgattgccaatgatccgcaacatgtgctgcaagcacttaaccgttagaggcatggttatgccatacagaaagcaccagcattcagaactcctatgaaagcggcatagtgccgcctgctcaggagttttgctatgacccgtaatcgtgctgaacgtcgccatcatatggtgcgattaaaaaaaatccgctgtcgttatcgcactgcaggcgatggaagcaaaaaagcatcaggtatttgctttcgtactccctgtatttgttcttgttggatgtgtgggcatcgacgctatcataatggtccccgcgtatcggaaattcgtgcaaaagcacgctatgcgaattaagggaaaatgatgaactattttaaggaagcacatttttagaactcttaacaggagactaaaaatgtccacgtttaatacgcgtaaagatagggatcgtaatggtaaagcgaagccgcataagcattcagggatcccaacacttacaggtaaatggcgtcacccttcaatggattgttgggtaaactacagtacaccgggcgatcatgaatggaagcggctctatactacgcttcgccgtcgcgcagatgatcgacgccaatgtcatcgggtaatgcagggggatgatccggaaggaatcgtctggttcccggactgttatccacaaatttactactactaacaattaaa

SEQ ID NO: 289 - DNA, 912 bp, Escherichia coli
atgagttctactatggcactggaaaaaggaattgcagagttagtcgaagagtttatcgctgcgggtcgcccctcatcgcgccaacaaagtattacgcagcgcagagagggctatatcgccagcgctgtccttgcgggtgagacagaaacgcgggtagatattcagactatcgaacttgaagggatgaccttacgaatagtgtcaccgctgaatgccccgacattactcccgacgataatttattactacggtggctgttttgttagcggcgggttcgcaactcacgacaaccagctgcgccagttagcctattacgggcaatgtcggattattgccgtccagtatcggctggcaccggaacatactttccccgccgcccatgatgatgcacaacgaggtgcagaattagtccggcaacacgccgaacgactcggcgttgataaacaacgaataactcttgccggtgacagtgcgggcgggcatctggcgctggtaactgctttgcgattgagcgtgctggctgtggcaaccagcacaactcatcttaattatcctatgcttgatgcgactgggcatttcgaaagctacatacgcaatggtcacgattacatcatcacacgcgacactttactgagcggctttgagatgtacctgccaggcattgaacgcaggcatctgaagccagccctatttggcgcaatgatttcaatggcttgccacctgtcatatcattaccgcagaatcgacccactttgcgatgaaggtgaagcgttgtatcaccgcatgacagggcaaggagtgcaatgcacctgccaacgctaccttggcgttatccacggattttttcagttaggtggtatcagtgaggctgcgcgatcggcgctacgggatgttgcctggagagcgggaagg

SEQ ID NO: 290 - protein, 242 aa, Escherichia coli
MALEKGIAELVEEFIAAGRPSSRQQSITQRREGYIASAVLAGETETRVDIQTIELEGMTLRIVSPLNAPTLLPTIIYYYGGCFVSGGFATHDNQLRQLAYYGQCRIIAVQYRLAPEHTFPAAHDDAQRGAELVRQHAERLGVDKQRITLAGDSAGGHLALVTALRLSVLAVATSTTHLNYPMLDATGHFESYIRNGHDYIITRDTLLSGFEMYLPGIERRHLKPALFGAMISMACHLSYHYR

SEQ ID NO: 291 - DNA, 309 bp, Escherichia coli
atgctcttcatcgaaacggaaatttttactgaagatgttcaaaaactgctgaacgacgatgaattcagtcgttttcagtttttcctggccttgaatcctgactatggtgaggtaatacctgaaactggtgggttaagaaaggttcgatgggtctcaggaggaaaggggaaacgtgctggtgtcagggttatttactttcatcaggttaaacattatgagatcagattactgcttatttatcgtaagggtattaaagatgatctgtctccccaggaaaaagcaatgctccggttgttaaatacgaggtgg

SEQ ID NO: 292 - protein, 103 aa, Escherichia coli
MLFIETEIFTEDVQKLLNDDEFSRFQFFLALNPDYGEVIPETGGLRKVRWVSGGKGKRAGVRVIYFHQVKHYEIRLLLIYRKGIKDDLSPQEKAMLRLLNTRW

SEQ ID NO: 293 - DNA, 288 bp, Escherichia coli
atggataaggcactttttgagcggttgactcacagcatggcccagatgaatgaaattattgaaggaacgcgacagccttcacggacttttgaagttgatgctatgaaaatcaaagaaatacgccgcgcttcagggttgtcacaatctaaatttgccgatcttatttccgtaagcgtagacacgttgcgtaactgggagcaggggcgacgttcaccgaccgggcctgcaaaggctttgctgcgagcgattgccaatgatccgcaacatgtgctgcaagcacttaaccgt

SEQ ID NO: 294 - protein, 96 aa, Escherichia coli
MDKALFERLTHSMAQMNEIIEGTRQPSRTFEVDAMKIKEIRRASGLSQSKFADLISVSVDTLRNWEQGRRSPTGPAKALLRAIANDPQHVLQALNR

SEQ ID NO: 295 - DNA, 276 bp, Escherichia coli
atgtccacgtttaatacgcgtaaagatagggatcgtaatggtaaagcgaagccgcataagcattcagggatcccaacacttacaggtaaatggcgtcacccttcaatggattgttgggtaaactacagtacaccgggcgatcatgaatggaagcggctctatactacgcttcgccgtcgcgcagatgatcgacgccaatgtcatcgggtaatgcagggggatgatccggaaggaatcgtctggttcccggactgttatccacaaatttactactac

SEQ ID NO: 296 - protein, 92 aa, Escherichia coli
MSTFNTRKDRDRNGKAKPHKHSGIPTLTGKWRHPSMDCWVNYSTPGDHEWKRLYTTLRRRADDRRQCHRVMQGDDPEGIVWFPDCYPQIYYY

SEQ ID NO: 297 - DNA, 8643 bp, Escherichia coli
aagtttcaatttcaggatacttcttgctcggcaaccaccagttcaacattctcttcacttaacaactggcagaaagaattgggaggcggggcatcagtaaaaaaagccctgacattccgtgcattgccaattgaaacggcagcagacgcggtaaacttcgtatgatcggccactaacaatgtattccgcgcatgtttaatcatcgttctcgcgactaacgcttcattgacatcaaattccagtagggtgccgtcatgttcaatggcacctatactggtgattaaataatctgcgcggaagccttcaataaatccggtctggcataatcccccgttatgagccgtaaagtgccttcggaaccatcacttcaatatcctgattcttataaagaatctgtgccacacgcaggctattagtgataatgcgtaaatcacgccggttgagtaatgccctggcaacggcttctacggttgtaccgatggtgataaagacggtacagcgttcgggaaggtaatcggcgactgcctcagcgatcgcccgtttctcggcggtgagcgaaagttcccgttgctcaaaagcggtattcatgacgctggagacgcgcccggcccctccatgatgacgggtgatcaagccctgctcactgagttttcggatatcccggcgcacggtttgcgttgaaacatccagcagttgtgccagttcttcaatattcatataaccgcgttctgcgattagatgaacgagttggtcatggcgtggattacctgtcacttcgatgatactcatgaatactcccttgcccctcctcggtagatgtttaccattttacgcataaagtgacaaaaatgattcggtttgctcacgattaggaatgccggcccgaccgccaggctgggtacatttcatcgcggcaaccgcactggcaaaacgaatagcctcttttgttggcattttttctgccaacgctaccgcgagtgcgccgtgaaaaacatcgcctgctccagtggtatcaaccacattgacagaaaatgcctcctgttgacacaaatgaccatcttcaatccacaacgatccttcagaacccagcgtaacatacactttacctgctgtttgtgtcgttgcctggaacaaaccttcttcaggtgactgcaggccagtcatgcgtttcagccctggtgttgagaacacggcgtgatcggcaagcgcgacaagtggagaaatatcctgcggtgtcatatcggcgtctaaaagcgttgtcacacccgcaaggcgcgctagcgagaatgctttttcagtaccgctatgccagcgaacatcggccagaatcagatcataacgagagaaatcgatcgcttctaaccattcggcatcagtaccgagatcaggacttggataattaacgataatccgttcgccatgctgatcaacgaggatcgctgattgcgacgaacgggcgttaggatatcggcggcaaaatgcggtattgacgccccaaccctcaagttctgcaagtaaggtatttccacaactgtcatcgccgatgcgaccgatgaaatcaacctccacgccaagctttgcgattgcaacagcggctgttgctgccgggccgccaccaatctcaagataatgatttgcctgatatttcccgccaccctccggcagagtgggcaaagaataaattctgtcctgaactgtgatacccacgcatgcaattctggtcatatttgtcttgtcctgtttaattttgtcgtctttggtcaatttaaatgacacaaatgatcaaattagtgatgcgtgtcgtgtttttgaacataaattacaaatatgctcaaaaacagacgaaaacgaattttcaattgtcattattttgtcaatgtcagacaggagagtattcatggcaaccattgcatttctcgggctggggcagatgggtagcccaatggctaacaatctattgcaaaaagggcattcattacaggtatttgatgtcaatacacaggccgtcgatgcgctagttacgcagggggccactgcggcacaaaccccagcggaagcggcagcaagcgctgaatttatcatcactatgcttcccaatggggacattgttcgacaggtgctgttgggggaaaaaggcgtctgtgaaactgtttcatctgacgcgttagtgattgatatgtcgactattcatcccttacagaccgatgcattaatacgggaattacaagaaaaaggcatcaatatgatggacgcccccgtgggcagaacgtcagtgaatgcgattgatggcacattgctgattttagcgggcggcactgatgagcagattgcgcgtgcacgcccgattctcatgtgcatgggtaatgagctggtcgaggctggtggcccaggaatggggatccgcgtgaagctaattaacaactatatgagcattgcgcttaatgcgctgtcctccgaagccgctgtgttatgtgagtcactgggattaaatcttgatgtcgcaattaaggtgatgagtggtacggcagcagggaaaggacattttacgaccacctggcctggcaaagtgctgaaaggcgatctttctcccgccttcatggtggacctggcattgaaagatctgcgtattgcagttgacgtcgctcggaaaacgggggcgccgctcaatatggggattgcagcagaaagttattacgccgcagcaagtcaagacggcaaagggcggcaggactggagcgccctgctaaatcaggttcgccagcaggctggtctttaattttatctattaacaggagtttctatgtcatcccacttcaccccatttacgctgaaagatatctcccgcccaggtggtggattcgccatgttagctgtcgatcagcgtgaggccatgcgcctgatgtttgcggcagcagggcagccaaaacccatcgccgacagtgtactcaccgattttaaagttgccgcgacccgaatcctttctccttatgcttctgccgttctggcggataaacaattttgtcttgaacaaatagtcgagcagggcgctgtggctaattcttgcggcctgattgtcgctgccgatctttttatcccaggtaatggcatcccggttgatagcgttgaaatagatatgtccgtcgacccgcataaagcccgtgaaatgggggctaaggcaatgaaattacttgtactctggcgtgaagatgaacccgcagaggaacgtctggcaatggttgataaatttgttcgtcgctgccgtagtgccgggctggttagcattattgaacctgtggtgcgtccacctcgtcgcggttgggactttgatcgtgaaagcgccattgttgccgccgccgcagagcttggtggaacagaggctgatctttacaaagccgagatgccattagggggcaaaggcgatgaaaaaaccttacttgccgcctgtcagcaacttaacgatcagatgaagatgccgtgggtaattctttcttctggcgttgatgccgatatttttggccgtgcagtaagtattgccatgaaaggtggtgcgtcgggcttcctggctggacgagcggtttgggcgtcggttgttggtgcacaagatccacaaaccatgctgcgcgatgtctccgttccacgcttgcaacggctggctgaaattgtcgatgaaggtatcgcgcaacgctaatcccctatggatatcgattctggagaataacaatggataaaattacccaggttttattttcagatattgggaaagtcaccactcaatatgttgaagtaccacaccagcaacttaaaccgcacgaagtacggattgcgcccgtgttctacgggatatgcggttcggatctgcatgttctgaaaggcggtcatccgtttgccaaaccgccagtcgtccccggtcatgaaattgcagcgcgcgttacggaagtgggcagcgacgttaaaaatgtacagccgggcgatcatgttgtggtcgatcccatcatggcttgcatggaatgccgagcctgcaaagcaggacgttttaatctttgtgaaccaccgcaggttgctggtttccgcgcaccgggctttgctcgctcacaacacattgttcctgcgcgtaattgccatgtcgcaccagcctctttaccgctaaaagtgttggcctttgccgaaccggcggcttgtgctcgtcactgcgttaaccgaatgccgaaagcttctctggaaagcgtactggtgattggtgccggaacgataggcttatccatcgtgcaggcactgcgcattatgggggcaggtaagattaccgtgattgaacctgacgctgccaaacgcgcgctggcgttaaagctgggcgcagcagaagtttgggcaccaggtgagctggccgcagatgtgcgatttacgggggcgattgatgtcgttgcagcgcaggccacgcttaacgatgcatgtacccgtgtatatgccggaggcaccgtcgtgtgcatgggcgtaccaagtgggccgcgtgaaataccattaccgatgatgcaacgtttcgagcgtgacttgctcaactctggcatgtacatccctgaagatttcgatgctgttatcgaatggctggcggatgggcggtttgataccagtgaactggttaccgatttatttgccattgaggatgcagcggcggcattcgaacgcgcgcagcaaaatgattccataaaggtcatgctgcaatttgcgccggaatgattttctaaatctctgtctggcgctgcgtcacgccagcgccaccctacaacaattaaaaaggacactgcgatgagtcaaatcaccagtcctgcaacttattcaattagtcggccacaggacgtaattgatattgttaataagaactctgcaatcaacaccagtatcggcgttatttttattgctttgggcggcatattgattgatgcctaccaggcggcgatggtggggtttggtaataaatacattgccgctcaattcggcatttcgccgggtcttgctgcaaccgtcaatgcatcagtattaatcgccgcgttaattggcggtttattagcgaaccgagtaataaaccgctttgggcaaaagcgggcatttattattggcatggggctgtgcaccatcggtgctgcagcggtagctattgctcccagtatctggtgggtgctggtgtgccgcgtcatcatgggctttggtttaggcatcgacttccctttggcaaccaatgccgtggcagagcttcgtggttcaacgtcgaagaaaaccggcacgtcggtcaacctctggcaaatggcctggtatgtttcgacaaccgttgtttatttggtgcttttgccgctgcttctgtcgggtatcgctgaagaacaattgtggcgttacggaatattcatcggagctatttttgcagtcatcttcatgattttgcgttacttctttattggtgaatccgcaatgtgggccgcacgcgtcgggcgttaccaggaagcgtgcgacattctgggaaaacgttatggtgttcaggctcgcgttgcggcatcgggtacaacagaagcgaaattctcggaaaaagcagagaataaatacagtggtggatatggcatcttatttaatgatcgttaccgcaaacgcaccattcttggctgtgtcgtggcaaccatgcaggcgtggcaatataacgccgtaggtgtttatcttcctcttacgttggcgggaataataagtggcgggcttactggcgcgttaaccggttctgccgtcgtgaatgccctttgtggggtgacaggcgggatgatcggctcgtttattctccaacgactgggtactcgccgacagtcgatgtatggatttgctgttgtgaccttagcattgctgtcgttaggcgcactggcaacgactaatccctggctgtctttagggttattgggatcaattattttcttccattcagcgggtcctggtgggctgggcatgaccattgccacactctcttatcctcccgctattcgccctactggggtcggatttgcccgcgctattatgcgcacaggggcaattgcaggactcattttctggccgatgctgtggggtgcgttgaaaactgaagcgttttactggttggcaatcgtgccattcctgggattcctgacctgtgtattgattaattgggaaccactgggtgcaaatgttgatgctgaggacgcagaggttctggctgaattgaagaaataatttaatgcgcatcggtttaagccgatgcgcattaattcaaactgcccacgtttagtggttcgtatcccagatttctcgcctaccaggagaggaaaattatgtctgaaaagttacccgcaccgcgtgaagggctttccggtaaagccatgagacgtgtcgttatgggcagtttcgcaggcgcgttaatggaatggtatgacttctttatttttggcacggcagcaggactggtatttgcaccgctgttttatccagacagcgatccttttataggtcttatagcttcctttgcgacctttggtgtcggttttctgactcgtcctttaggtggcatcgtctttggtcattttggcgataaaatagggcgaaaaataacgcttatctggacgttggctattgtcggttgctccacatttttgattggttttattccgacgtatcaggaaattgggatctgggcaccgctcatattaatggtgctacgtttaattcagggctttggtcttggtggcgagtacggcggagcggcattgatgaccatagaatcagcgcccgaatcccgacgcggatttttaggttcactcccgcaaacggctgcgtctgtgggtattatgctggcaaccggtatttttgctctctgtaaccattttcttacttcggagcagtttctctcctggggatggcgcattccgttttggctttctgcggtgatgttgatcgttgggctgtttatccgcctgcataccgaagaaacgctggattttcaaaagcaaaaaacgacgaataataaagaaaagtccgttcctccgttgattgaattattcaaaaaacatccacgaaatattttattggcactgggtgcgaggctggcggaaagtgtctcctctaatattattaacgcctttggtattgtctatatttccagccaattagcattgtcgcgagatattcccctgacgggtatgttgattgcctcggcgatcggtattttcagttgtccattggttggatggttatcagatcgtataggtcaaaaaagtctgtatttgtcgggagcaggattttgtgtcctgttcgcgtttcctttcttcttattactggatagcaaaagtacgctcatcatctggtgcagtatgatcctcggctacaacttaggtccgacgatgatgtttgccgtgcagccaacacttttcacccgcatgttcggtaccaaagtacgatataccggcctttcttttgcttatcaattttccgcgattcttggcggactaagcccccttatcgcctcaagtttgctggcgctagggggaggaaaaccgtggtatgtcgctctgtttttatttgctgtctcagttctttcctttgtttgcgtctggctgattgagccgaccgatgaacaagaaaccgcttcttaccgctacatcagggaacaatctcatgaaaactgaacgaaaaaacgagcattacctggcgctacaacaggcgtttgacgcgccatggcctgggcctgtaggagagttagtgatgctggaaaaaggcaatattcacctgcagatttatccgcatgatggtgccaggataacctcgttaaaggcatttggttctgaagtattacgccaatggcagccgcagcgcagagcttttcagtatggctgtttcccaatggtgccgtgggcagggcgactggggaatgcgacgctgaatgctggtgggcaatgttattctttacccgccaataaaccaccacatgcgttgcatggtatggcttgttactcaacgtgggaaatcatcgacaaaacagcagattccctgactttacgtatgcccctggcttcaccgtggccctggcaaggggaagtgattcagacttttttgctggagaacgatgcgctggttttgcaactggaagtccattcatatgccgatacattcccggcctccgcaggctggcatccgtggtttgcgaaaaagctgactccgcaaaatacagaatcgttgcaggtgctttttgatgcggactggcaagaagaagcgggtagtgatgaactgccaactggaaatcgtatctctcctcaagttggtccctgggatgactgttttggtttttatgacggggtgaaggttaagttactgtggcctggtaaactcgcgatgaccatgacctcttctgcaaacagtctggtggtatttgataaacagcccgatgccacctgtattaacccgctgactcaggcacctaacgcaataaatctaacgccggaatttgtgacaccagataagccgctggtcatcgaaactcgttggcaatttacacctgaatcttaaccattcatctattgcgaaaaagccagtgaaattactctgctttttcgcaatcagcatcacaagattacccttattgccacatag

SEQ ID NO: 298 - DNA, 894 bp, Escherichia coli
atgaccagaattgcatgcgtgggtatcacagttcaggacagaatttattctttgcccactctgccggagggtggcgggaaatatcaggcaaatcattatcttgagattggtggcggcccggcagcaacagccgctgttgcaatcgcaaagcttggcgtggaggttgatttcatcggtcgcatcggcgatgacagttgtggaaataccttacttgcagaacttgagggttggggcgtcaataccgcattttgccgccgatatcctaacgcccgttcgtcgcaatcagcgatcctcgttgatcagcatggcgaacggattatcgttaattatccaagtcctgatctcggtactgatgccgaatggttagaagcgatcgatttctctcgttatgatctgattctggccgatgttcgctggcatagcggtactgaaaaagcattctcgctagcgcgccttgcgggtgtgacaacgcttttagacgccgatatgacaccgcaggatatttctccacttgtcgcgcttgccgatcacgccgtgttctcaacaccagggctgaaacgcatgactggcctgcagtcacctgaagaaggtttgttccaggcaacgacacaaacagcaggtaaagtgtatgttacgctgggttctgaaggatcgttgtggattgaagatggtcatttgtgtcaacaggaggcattttctgtcaatgtggttgataccactggagcaggcgatgtttttcacggcgcactcgcggtagcgttggcagaaaaaatgccaacaaaagaggctattcgttttgccagtgcggttgccgcgatgaaatgtacccagcctggcggtcgggccggcattcctaatcgtgagcaaaccgaatcatttttgtcactttatgcg

SEQ ID NO: 299 - protein, 298 aa, Escherichia coli
MTRIACVGITVQDRIYSLPTLPEGGGKYQANHYLEIGGGPAATAAVAIAKLGVEVDFIGRIGDDSCGNTLLAELEGWGVNTAFCRRYPNARSSQSAILVDQHGERIIVNYPSPDLGTDAEWLEAIDFSRYDLILADVRWHSGTEKAFSLARLAGVTTLLDADMTPQDISPLVALADHAVFSTPGLKRMTGLQSPEEGLFQATTQTAGKVYVTLGSEGSLWIEDGHLCQQEAFSVNVVDTTGAGDVFHGALAVALAEKMPTKEAIRFASAVAAMKCTQPGGRAGIPNREQTESFLSLYA

SEQ ID NO: 300 - DNA, 876 bp, Escherichia coli
atggcaaccattgcatttctcgggctggggcagatgggtagcccaatggctaacaatctattgcaaaaagggcattcattacaggtatttgatgtcaatacacaggccgtcgatgcgctagttacgcagggggccactgcggcacaaaccccagcggaagcggcagcaagcgctgaatttatcatcactatgcttcccaatggggacattgttcgacaggtgctgttgggggaaaaaggcgtctgtgaaactgtttcatctgacgcgttagtgattgatatgtcgactattcatcccttacagaccgatgcattaatacgggaattacaagaaaaaggcatcaatatgatggacgcccccgtgggcagaacgtcagtgaatgcgattgatggcacattgctgattttagcgggcggcactgatgagcagattgcgcgtgcacgcccgattctcatgtgcatgggtaatgagctggtcgaggctggtggcccaggaatggggatccgcgtgaagctaattaacaactatatgagcattgcgcttaatgcgctgtcctccgaagccgctgtgttatgtgagtcactgggattaaatcttgatgtcgcaattaaggtgatgagtggtacggcagcagggaaaggacattttacgaccacctggcctggcaaagtgctgaaaggcgatctttctcccgccttcatggtggacctggcattgaaagatctgcgtattgcagttgacgtcgctcggaaaacgggggcgccgctcaatatggggattgcagcagaaagttattacgccgcagcaagtcaagacggcaaagggcggcaggactggagcgccctgctaaatcaggttcgccagcaggctggtctt

SEQ ID NO: 301 - protein, 292 aa, Escherichia coli
MATIAFLGLGQMGSPMANNLLQKGHSLQVFDVNTQAVDALVTQGATAAQTPAEAAASAEFIITMLPNGDIVRQVLLGEKGVCETVSSDALVIDMSTIHPLQTDALIRELQEKGINMMDAPVGRTSVNAIDGTLLILAGGTDEQIARARPILMCMGNELVEAGGPGMGIRVKLINNYMSIALNALSSEAAVLCESLGLNLDVAIKVMSGTAAGKGHFTTTWPGKVLKGDLSPAFMVDLALKDLRIAVDVARKTGAPLNMGIAAESYYAAASQDGKGRQDWSALLNQVRQQAGL

SEQ ID NO: 302 - DNA, 885 bp, Escherichia coli
atgtcatcccacttcaccccatttacgctgaaagatatctcccgcccaggtggtggattcgccatgttagctgtcgatcagcgtgaggccatgcgcctgatgtttgcggcagcagggcagccaaaacccatcgccgacagtgtactcaccgattttaaagttgccgcgacccgaatcctttctccttatgcttctgccgttctggcggataaacaattttgtcttgaacaaatagtcgagcagggcgctgtggctaattcttgcggcctgattgtcgctgccgatctttttatcccaggtaatggcatcccggttgatagcgttgaaatagatatgtccgtcgacccgcataaagcccgtgaaatgggggctaaggcaatgaaattacttgtactctggcgtgaagatgaacccgcagaggaacgtctggcaatggttgataaatttgttcgtcgctgccgtagtgccgggctggttagcattattgaacctgtggtgcgtccacctcgtcgcggttgggactttgatcgtgaaagcgccattgttgccgccgccgcagagcttggtggaacagaggctgatctttacaaagccgagatgccattagggggcaaaggcgatgaaaaaaccttacttgccgcctgtcagcaacttaacgatcagatgaagatgccgtgggtaattctttcttctggcgttgatgccgatatttttggccgtgcagtaagtattgccatgaaaggtggtgcgtcgggcttcctggctggacgagcggtttgggcgtcggttgttggtgcacaagatccacaaaccatgctgcgcgatgtctccgttccacgcttgcaacggctggctgaaattgtcgatgaaggtatcgcgcaacgc

SEQ ID NO: 303 - protein, 295 aa, Escherichia coli
MSSHFTPFTLKDISRPGGGFAMLAVDQREAMRLMFAAAGQPKPIADSVLTDFKVAATRILSPYASAVLADKQFCLEQIVEQGAVANSCGLIVAADLFIPGNGIPVDSVEIDMSVDPHKAREMGAKAMKLLVLWREDEPAEERLAMVDKFVRRCRSAGLVSIIEPVVRPPRRGWDFDRESAIVAAAAELGGTEADLYKAEMPLGGKGDEKTLLAACQQLNDQMKMPWVILSSGVDADIFGRAVSIAMKGGASGFLAGRAVWASVVGAQDPQTMLRDVSVPRLQRLAEIVDEGIAQR

SEQ ID NO: 304 - DNA, 1008 bp, Escherichia coli
atggataaaattacccaggttttattttcagatattgggaaagtcaccactcaatatgttgaagtaccacaccagcaacttaaaccgcacgaagtacggattgcgcccgtgttctacgggatatgcggttcggatctgcatgttctgaaaggcggtcatccgtttgccaaaccgccagtcgtccccggtcatgaaattgcagcgcgcgttacggaagtgggcagcgacgttaaaaatgtacagccgggcgatcatgttgtggtcgatcccatcatggcttgcatggaatgccgagcctgcaaagcaggacgttttaatctttgtgaaccaccgcaggttgctggtttccgcgcaccgggctttgctcgctcacaacacattgttcctgcgcgtaattgccatgtcgcaccagcctctttaccgctaaaagtgttggcctttgccgaaccggcggcttgtgctcgtcactgcgttaaccgaatgccgaaagcttctctggaaagcgtactggtgattggtgccggaacgataggcttatccatcgtgcaggcactgcgcattatgggggcaggtaagattaccgtgattgaacctgacgctgccaaacgcgcgctggcgttaaagctgggcgcagcagaagtttgggcaccaggtgagctggccgcagatgtgcgatttacgggggcgattgatgtcgttgcagcgcaggccacgcttaacgatgcatgtacccgtgtatatgccggaggcaccgtcgtgtgcatgggcgtaccaagtgggccgcgtgaaataccattaccgatgatgcaacgtttcgagcgtgacttgctcaactctggcatgtacatccctgaagatttcgatgctgttatcgaatggctggcggatgggcggtttgataccagtgaactggttaccgatttatttgccattgaggatgcagcggcggcattcgaacgcgcgcagcaaaatgattccataaaggtcatgctgcaatttgcgccggaa

SEQ ID NO: 305 - protein, 336 aa, Escherichia coli
MDKITQVLFSDIGKVTTQYVEVPHQQLKPHEVRIAPVFYGICGSDLHVLKGGHPFAKPPVVPGHEIAARVTEVGSDVKNVQPGDHVVVDPIMACMECRACKAGRFNLCEPPQVAGFRAPGFARSQHIVPARNCHVAPASLPLKVLAFAEPAACARHCVNRMPKASLESVLVIGAGTIGLSIVQALRIMGAGKITVIEPDAAKRALALKLGAAEVWAPGELAADVRFTGAIDVVAAQATLNDACTRVYAGGTVVCMGVPSGPREIPLPMMQRFERDLLNSGMYIPEDFDAVIEWLADGRFDTSELVTDLFAIEDAAAAFERAQQNDSIKVMLQFAPE

SEQ ID NO: 306 - DNA, 1431 bp, Escherichia coli
atgagtcaaatcaccagtcctgcaacttattcaattagtcggccacaggacgtaattgatattgttaataagaactctgcaatcaacaccagtatcggcgttatttttattgctttgggcggcatattgattgatgcctaccaggcggcgatggtggggtttggtaataaatacattgccgctcaattcggcatttcgccgggtcttgctgcaaccgtcaatgcatcagtattaatcgccgcgttaattggcggtttattagcgaaccgagtaataaaccgctttgggcaaaagcgggcatttattattggcatggggctgtgcaccatcggtgctgcagcggtagctattgctcccagtatctggtgggtgctggtgtgccgcgtcatcatgggctttggtttaggcatcgacttccctttggcaaccaatgccgtggcagagcttcgtggttcaacgtcgaagaaaaccggcacgtcggtcaacctctggcaaatggcctggtatgtttcgacaaccgttgtttatttggtgcttttgccgctgcttctgtcgggtatcgctgaagaacaattgtggcgttacggaatattcatcggagctatttttgcagtcatcttcatgattttgcgttacttctttattggtgaatccgcaatgtgggccgcacgcgtcgggcgttaccaggaagcgtgcgacattctgggaaaacgttatggtgttcaggctcgcgttgcggcatcgggtacaacagaagcgaaattctcggaaaaagcagagaataaatacagtggtggatatggcatcttatttaatgatcgttaccgcaaacgcaccattcttggctgtgtcgtggcaaccatgcaggcgtggcaatataacgccgtaggtgtttatcttcctcttacgttggcgggaataataagtggcgggcttactggcgcgttaaccggttctgccgtcgtgaatgccctttgtggggtgacaggcgggatgatcggctcgtttattctccaacgactgggtactcgccgacagtcgatgtatggatttgctgttgtgaccttagcattgctgtcgttaggcgcactggcaacgactaatccctggctgtctttagggttattgggatcaattattttcttccattcagcgggtcctggtgggctgggcatgaccattgccacactctcttatcctcccgctattcgccctactggggtcggatttgcccgcgctattatgcgcacaggggcaattgcaggactcattttctggccgatgctgtggggtgcgttgaaaactgaagcgttttactggttggcaatcgtgccattcctgggattcctgacctgtgtattgattaattgggaaccactgggtgcaaatgttgatgctgaggacgcagaggttctggctgaattgaagaaa

SEQ ID NO: 307 - protein, 477 aa, Escherichia coli
MSQITSPATYSISRPQDVIDIVNKNSAINTSIGVIFIALGGILIDAYQAAMVGFGNKYIAAQFGISPGLAATVNASVLIAALIGGLLANRVINRFGQKRAFIIGMGLCTIGAAAVAIAPSIWWVLVCRVIMGFGLGIDFPLATNAVAELRGSTSKKTGTSVNLWQMAWYVSTTVVYLVLLPLLLSGIAEEQLWRYGIFIGAIFAVIFMILRYFFIGESAMWAARVGRYQEACDILGKRYGVQARVAASGTTEAKFSEKAENKYSGGYGILFNDRYRKRTILGCVVATMQAWQYNAVGVYLPLTLAGIISGGLTGALTGSAVVNALCGVTGGMIGSFILQRLGTRRQSMYGFAVVTLALLSLGALATTNPWLSLGLLGSIIFFHSAGPGGLGMTIATLSYPPAIRPTGVGFARAIMRTGAIAGLIFWPMLWGALKTEAFYWLAIVPFLGFLTCVLINWEPLGANVDAEDAEVLAELKK

SEQ ID NO: 308 - DNA, 1347 bp, Escherichia coli
atgtctgaaaagttacccgcaccgcgtgaagggctttccggtaaagccatgagacgtgtcgttatgggcagtttcgcaggcgcgttaatggaatggtatgacttctttatttttggcacggcagcaggactggtatttgcaccgctgttttatccagacagcgatccttttataggtcttatagcttcctttgcgacctttggtgtcggttttctgactcgtcctttaggtggcatcgtctttggtcattttggcgataaaatagggcgaaaaataacgcttatctggacgttggctattgtcggttgctccacatttttgattggttttattccgacgtatcaggaaattgggatctgggcaccgctcatattaatggtgctacgtttaattcagggctttggtcttggtggcgagtacggcggagcggcattgatgaccatagaatcagcgcccgaatcccgacgcggatttttaggttcactcccgcaaacggctgcgtctgtgggtattatgctggcaaccggtatttttgctctctgtaaccattttcttacttcggagcagtttctctcctggggatggcgcattccgttttggctttctgcggtgatgttgatcgttgggctgtttatccgcctgcataccgaagaaacgctggattttcaaaagcaaaaaacgacgaataataaagaaaagtccgttcctccgttgattgaattattcaaaaaacatccacgaaatattttattggcactgggtgcgaggctggcggaaagtgtctcctctaatattattaacgcctttggtattgtctatatttccagccaattagcattgtcgcgagatattcccctgacgggtatgttgattgcctcggcgatcggtattttcagttgtccattggttggatggttatcagatcgtataggtcaaaaaagtctgtatttgtcgggagcaggattttgtgtcctgttcgcgtttcctttcttcttattactggatagcaaaagtacgctcatcatctggtgcagtatgatcctcggctacaacttaggtccgacgatgatgtttgccgtgcagccaacacttttcacccgcatgttcggtaccaaagtacgatataccggcctttcttttgcttatcaattttccgcgattcttggcggactaagcccccttatcgcctcaagtttgctggcgctagggggaggaaaaccgtggtatgtcgctctgtttttatttgctgtctcagttctttcctttgtttgcgtctggctgattgagccgaccgatgaacaagaaaccgcttcttaccgctacatcagggaacaatctcatgaaaac

SEQ ID NO: 309 - protein, 449 aa, Escherichia coli
MSEKLPAPREGLSGKAMRRVVMGSFAGALMEWYDFFIFGTAAGLVFAPLFYPDSDPFIGLIASFATFGVGFLTRPLGGIVFGHFGDKIGRKITLIWTLAIVGCSTFLIGFIPTYQEIGIWAPLILMVLRLIQGFGLGGEYGGAALMTIESAPESRRGFLGSLPQTAASVGIMLATGIFALCNHFLTSEQFLSWGWRIPFWLSAVMLIVGLFIRLHTEETLDFQKQKTTNNKEKSVPPLIELFKKHPRNILLALGARLAESVSSNIINAFGIVYISSQLALSRDIPLTGMLIASAIGIFSCPLVGWLSDRIGQKSLYLSGAGFCVLFAFPFFLLLDSKSTLIIWCSMILGYNLGPTMMFAVQPTLFTRMFGTKVRYTGLSFAYQFSAILGGLSPLIASSLLALGGGKPWYVALFLFAVSVLSFVCVWLIEPTDEQETASYRYIREQSHEN

SEQ ID NO: 310 - DNA, 885 bp, Escherichia coli
atgaaaactgaacgaaaaaacgagcattacctggcgctacaacaggcgtttgacgcgccatggcctgggcctgtaggagagttagtgatgctggaaaaaggcaatattcacctgcagatttatccgcatgatggtgccaggataacctcgttaaaggcatttggttctgaagtattacgccaatggcagccgcagcgcagagcttttcagtatggctgtttcccaatggtgccgtgggcagggcgactggggaatgcgacgctgaatgctggtgggcaatgttattctttacccgccaataaaccaccacatgcgttgcatggtatggcttgttactcaacgtgggaaatcatcgacaaaacagcagattccctgactttacgtatgcccctggcttcaccgtggccctggcaaggggaagtgattcagacttttttgctggagaacgatgcgctggttttgcaactggaagtccattcatatgccgatacattcccggcctccgcaggctggcatccgtggtttgcgaaaaagctgactccgcaaaatacagaatcgttgcaggtgctttttgatgcggactggcaagaagaagcgggtagtgatgaactgccaactggaaatcgtatctctcctcaagttggtccctgggatgactgttttggtttttatgacggggtgaaggttaagttactgtggcctggtaaactcgcgatgaccatgacctcttctgcaaacagtctggtggtatttgataaacagcccgatgccacctgtattaacccgctgactcaggcacctaacgcaataaatctaacgccggaatttgtgacaccagataagccgctggtcatcgaaactcgttggcaatttacacctgaatct

SEQ ID NO: 311 - protein, 310 aa, Escherichia coli
MNKKPLLTATSGNNLMKTERKNEHYLALQQAFDAPWPGPVGELVMLEKGNIHLQIYPHDGARITSLKAFGSEVLRQWQPQRRAFQYGCFPMVPWAGRLGNATLNAGGQCYSLPANKPPHALHGMACYSTWEIIDKTADSLTLRMPLASPWPWQGEVIQTFLLENDALVLQLEVHSYADTFPASAGWHPWFAKKLTPQNTESLQVLFDADWQEEAGSDELPTGNRISPQVGPWDDCFGFYDGVKVKLLWPGKLAMTMTSSANSLVVFDKQPDATCINPLTQAPNAINLTPEFVTPDKPLVIETRWQFTPES

SEQ ID NO: 312 - DNA, 1834 bp, Escherichia coli
atattacagttaattgtaatcgcggggcgggtttgtgatgagcacggatatgtcacgaagtcgtaacaatataaagcagagtgaaggataaattttgtgaataaagtatcattatttaatgattttgtgaatgttaaaatgtctcagataatttgtttaagcgttatttatatttgtggcttatgagtcagcgtgaatcatatctaatattttttacgatatttagttaaaaacgggcactattgttatattcctcacgttccaggaaatcagcggatttactcatattatgcggcgggatactatccatcggcctgctgaagttggattaaaaattcgaaagtgcacaccttatatttctctatatacgtattccttttggaaagcgtagggtctcctttatttcagggaacgtaaataatgaaaaaatcgacattatctttagccatcggtttattattggcatgtagtaccggtatggcaaaaacacagcatttaacgctggaacaacgcctggaagcggcagaaatgcgggcagcaaaagcagaggggcaggttaaacagcttcagacacaacaagccgccgagatccgcgaaattaaaaccgcacagggcaacacgccggtaaacggtcaatcaacgacggagtcagagaagaaaaacgccaccccgcctaatctcctgctttcagggtatggcgatttaaaaatctacggtgacgtagaatttaatatggatgcggaaagtaatcatggcctgctggcaatgaccaacgctgatgtgaatagcgatcccactaatgaacatggaatctcaatggtcgtattctgttaggttttgatggtatgcgaaaactggataatggctatttcgctgggttctccgcacaaccgctgggggatatgcacggttcagtaaatatcgatgatgcggttttcttctttggcaaagaaaacgactggaaggtcaaagtaggccgttttgaagcctacgatatgttcccgctgaatcaggatacctttgttgaacattccggtaatactgcgaacgatctttatgacgatggcagcggttatatctatatgatgaaagagggccgcggacgttctaacgctggcggtaatttcctcgtcagcaaacaactcgataactggtattttgaattaaacacgttactggaagacggaacatctttatataacgacggtaattatcatggacgcgatatggaacagcagaaaaatgttgcttatctgcgtccggtaattgcctggtcgccgacggaagaattcaccgtttccgcagcgatggaagcgaatgtggtaaataatgcttatggttataccgatagcaagggtaattttgtcgatcagtccgatcgtaccggttatggcatgagtatgacctggaatggcctgaaaaccgatccggaaaatggcatcgtggttaatcttaataccgcctatttagatgctaataatgaaaaagatttcacggcagggattaacgcgctgtggaaacgtttcgagctgggttatatctatgcacataataagattgatgaatttagtggcgtggtttgtgataacgattgctggattgatgatgaaggaacatacaacattcacaccattcatgcgtcttatcagttcgctaatgtgatggatatggagaactttaatatttacctcggcacgtattactccattctggatagcgacggcgataagatacacggcgacgatagtgatgaccgttacggcgcacgcgttcgctttaaatacttcttctgatgaaagggcggtgctggatattttccggcaccgcaactcat

SEQ ID NO: 313 - DNA, 1368 bp, Escherichia coli
atgaaaaaatcgacattatctttagccatcggtttattattggcatgtagtaccggtatggcaaaaacacagcatttaacgctggaacaacgcctggaagcggcagaaatgcgggcagcaaaagcagaggggcaggttaaacagcttcagacacaacaagccgccgagatccgcgaaattaaaaccgcacagggcaacacgccggtaaacggtcaatcaacgacggagtcagagaagaaaaacgccaccccgcctaatctcctgctttcagggtatggcgatttaaaaatctacggtgacgtagaatttaatatggatgcggaaagtaatcatggcctgctggcaatgaccaacgctgatgtgaatagcgatcccactaatgaatggaatctcaatggtcgtattctgttaggttttgatggtatgcgaaaactggataatggctatttcgctgggttctccgcacaaccgctgggggatatgcacggttcagtaaatatcgatgatgcggttttcttctttggcaaagaaaacgactggaaggtcaaagtaggccgttttgaagcctacgatatgttcccgctgaatcaggatacctttgttgaacattccggtaatactgcgaacgatctttatgacgatggcagcggttatatctatatgatgaaagagggccgcggacgttctaacgctggcggtaatttcctcgtcagcaaacaactcgataactggtattttgaattaaacacgttactggaagacggaacatctttatataacgacggtaattatcatggacgcgatatggaacagcagaaaaatgttgcttatctgcgtccggtaattgcctggtcgccgacggaagaattcaccgtttccgcagcgatggaagcgaatgtggtaaataatgcttatggttataccgatagcaagggtaattttgtcgatcagtccgatcgtaccggttatggcatgagtatgacctggaatggcctgaaaaccgatccggaaaatggcatcgtggttaatcttaataccgcctatttagatgctaataatgaaaaagatttcacggcagggattaacgcgctgtggaaacgtttcgagctgggttatatctatgcacataataagattgatgaatttagtggcgtggtttgtgataacgattgctggattgatgatgaaggaacatacaacattcacaccattcatgcgtcttatcagttcgctaatgtgatggatatggagaactttaatatttacctcggcacgtattactccattctggatagcgacggcgataagatacacggcgacgatagtgatgaccgttacggcgcacgcgttcgctttaaatacttcttc

SEQ ID NO: 314 - protein, 456 aa, Escherichia coli
MKKSTLSLAIGLLLACSTGMAKTQHLTLEQRLEAAEMRAAKAEGQVKQLQTQQAAEIREIKTAQGNTPVNGQSTTESEKKNATPPNLLLSGYGDLKIYGDVEFNMDAESNHGLLAMTNADVNSDPTNEWNLNGRILLGFDGMRKLDNGYFAGFSAQPLGDMHGSVNIDDAVFFFGKENDWKVKVGRFEAYDMFPLNQDTFVEHSGNTANDLYDDGSGYIYMMKEGRGRSNAGGNFLVSKQLDNWYFELNTLLEDGTSLYNDGNYHGRDMEQQKNVAYLRPVIAWSPTEEFTVSAAMEANVVNNAYGYTDSKGNFVDQSDRTGYGMSMTWNGLKTDPENGIVVNLNTAYLDANNEKDFTAGINALWKRFELGYIYAHNKIDEFSGVVCDNDCWIDDEGTYNIHTIHASYQFANVMDMENFNIYLGTYYSILDSDGDKIHGDDSDDRYGARVRFKYFF

SEQ ID NO: 315 - DNA, 7646 bp, Escherichia coli
agtgattattgaacaaaagctggcagttgccagcttttgttgtcacccctaaacctcttcctggggaagtggtgattgattgtcattttgcctttggtcagtgcccccggtaataagggggcttttgtgttgagcgatgaagtaacagagtgaatggtgaagttattaatgacaattacaaaatgacattaagtaacaatatctaaaatgtcacctaatttaaaattgataaccaatagtagtataggttccccatcctgtattttttaattcaaatggaccatctccgaagttaaccttctctcccgcattccattgtccaccgttgtgaaaataacgtagtgtaaatgcaaatttccagtgttcatatagaagggaaaggatatggcttgaagcaatagcattactggttcgtttattattgtgtgacttgtccgcaagatcggagccaaaatcaaagttagtaaaactattgtataccaatcgtcctccgaataaatttgtaagagggatgctatattttattttgaatcgatatccgtcccattcattttcattagcggcaccatagttttgccactgatacttggcgtatatattggcagaaagcttaattggtagacccgtgtcgatatctgtaccaagccccatataccatgtactttgccgggatgactggttgtcacccatatcatagacatagttgtttgcaatgaaccattctttaaatgggccgaacgcaagatttaatccggtcaatttgtcaatggaaaaccgaggttctatttccgtaaatagtggtgagccctcatcccagatcccaacatcatagtgactgccgacgccaaagaatttcggtagatcaacataaccataaaaatcaaaccagtcttttcttcctgctacagtatattcagggtagaggtcgttagtcagtcttgggccaaagcgagagtctgtgcgaccaatgacattcaagctttgatgtaaccagctttcatcaattttaatttcctgagcgtttccaatgcaaggtattaatagaatggataaagctatccagtgcttttttatatacataaatatatctcttatatattgttgatttagagagaaataatgtcatccagtgaatgaatggtattataagtttttgttatttgcttacttctacccgcatttcatttacctgtgcaggagtaatcttgtggcctttcttaaaataatcgattacgacattggacatgttatttccggcgcggacctggacatttttcccttctttgaatgccagaaaaccatcgcccccaagtgcaaggaaagtcgtagtcgcaacatggtaaatattcgtatcaacgatctcttcaccattaattttaaaagatacaatgcgctgacctactggtttctgcagggtatagcgcatttctgcgccttttgacatttgcaggatgccattggtaagcgatgccccgtgttccagtaggttacgcagatccttaccgctgagatccatttcagtaagttcattcttgaaggggaatgtactggtaatgtcaccaaaggtaatcgtgcctgcatttatatcagcacgtaaactgccggagtttatcaacgcaatttgtgcagtcggtgcagcgacaagcattgcatcggtaaacaggttgccaagttgcgatgactcaccgtaggcacgagttaatgcaatcgatgattcaccgactggttggcgtacaagatccgccagttttttattccagccattgataactttttgtgtggttggatcaggtatccattcatcggcataaaccgttttcagctcaaagctcttcactttatgagtacgagctgtagggttgacatcaaggattaatttaccaatatcgataccgccactgtcagtcgaaaggattaaggtgttgccgactttgattggttctggcgttccgacgtgggcatgcccggtaatcagaatatccaatcctttcaccttgcttgcggtttgaatatctttatccagcgcacgtctaacatctgtattgccaatgctggactgacgcgccggtacgccttcatgaaccagcgccacggtgaggtcaaccttatcacgtaactcatcgatataatgctgcaaatacttcacttcatcacgtgcttcaatcccctgattcttgagggtcgcggaagatttatcaaatcggttattattgtcattatcgagtccctggagagagagctccgagaccgtgtcattaaatgcaaatacgccgtgtagcccaacaataccaatcttgatgccatctttttccaggatggtgtagggcttgttccagaagggtttctcactctctttatgataaacattgcctaataaaacagggaaattcgctttgcttaattgtcggagggcattatcccagccatggtcaaactcatgattaccgattgatactgcgtcaaaaggcatggtattcataatatcaattattgcttcgccctttgtcaggctactgatatatggcccggtgaaatagtctccagcatcaaaataaaaggtggctttatttttggctttctcttgttttactaacgtggatatattggcaaagccaccaatgtcgcgttttccgtctgcgacatacggtactttataggaatccacatgagcgtgaagatcattggtataaataatcgtgacatcctgcgccataactgaggtcgaaaaaatagtcagcaatgttgcggcaaataaagtacgctgcgctgttttcattcgcattccttgttaaataaattgactgataaatgagattttatttggcgacgtccatgactcgtttagttaagtctggggtgacaggtttatgatttttgaaataatcgatgatagattccgccgaggttgttcccggtatcgtcttcacattttttccattcaaaaatgcttcaaaaccgtcaccaccactggcacaaaaggagtgcgtggcaatacgatatgtttgattatcttccacgggtttgccgttaatggtgaaagagattaaccgttggttgagtggttttttgctgtcatagacaaccgcaacacttttagaaacttgtaacacaccgttagttagattggttgcatgcgtcatcaatgatttgagatcgcggcccgtcaaatccatctcgatgaggtcattattaaaggggaatgtgctaataacatctcccagtgtgatatcgcctttaggaaaatcagctcgcatcccaccgctattttgaaatccggcaacggcatcaggtgttttttccatcattgcatcaagaataaggttgccggtagaagaggaactaccatactcacgtgttaaaactacgggagaatggccgacaacttcctttgttattttgttaagctttgcactccatttatcaatagtattttgaacgatggtgtcaggtttaaattgatctgcaaagatggtgattaactcaccattataactatcaattttcttcgttttcggattgtaatcaagcacaagttttccgatgttggtgccgtatgcatcggtagatacaattaatgtgttattaacttttattggttgcggtgttccgacatgtgcgtgaccggtaattaagacatcaacaccattcacttttttagctgtctcaatatctgcctgtagtagccgctccacatctttactaccaaagcttgattgacgcgccgggacaccttcgtgaattagcaaaacggtaatgtcgactttaccttttaattctgcaagtgctttatttaaatatttaatttcgtctctggcttctacgccttcacgtgcttttgccgcgactgtatcatagaaagcgaatgcgccatgcaatccaatcacaccaatctttaaaccatctttttcgataatggtccacggatgatcccaaactggtttattcgtatcggtgtagtagatatttcccagcagaatggggaattttgcttttgataactgagacaccatattgggcacaccgtgatcgaactcgtgattaccaacagacaccgcatcaaagggcatagtgttcatgatatcaataatagcttcacctttggtcagggtgctgatatacggcccggtaaaatagtcgcctgcatcaaagaaaaacacatctttgctttttttcttcgcttcattaacgatgcctgcaatattagccataccacctataagtctgttcttatcaacagcgatgatttttgccggattgacatgtgcgtgaatgtcattcgtataataaatagtaacgtcctgagctagaacactgtgagaaaatatcacgccgaatatgactgataatgttgtaaatacagttttcatcatccctcctggatagggtgtgttacatttgttgaattatttaaataaaaggcacatcgtgtcttattttatgtaagcatagttcagaaaagtattgtgtgatcttagtaacaaataatgttattaattaaacattgaccatgattatatttcacggtcatacatttatatatttaattaaatgaaaggtagtgatctctcttaatttatggtcgtttgtcgagtgtattgactaacaagatggagtgagcgattcattgtattttaacgccagtgaggtcagcatttgcgttacgcgacctgcggataataacgcgctttgggtaaagtcgtgttggtctgtcagccatgtgataaaacaacggactggttgccagagaaacatttgcgcccctttctaagctggctcccgtgagtaggcagaccatcttgcaattattcccctgctcccagcgctgccactgattttgccaccaaccatggtatgtcgttcccttaaaatgccagggcgtatcagcgttactgtcactgatttcttcttctacgaaccaaagttcaccttgttgttggcggaactgatctgcccaggctgtaataattgcgcctcttagaaaacattcgtgtgaaataatatgcgttttgacatctggatagcggattttcagtattctgaaatgcccgtgtgccgtgataaccgggcgtagtatggctcccttaccgttgcgcttgagtacagcactgccatactgaatttcatcgaactggctccggcgcaagaattgcgcttcacgcatatctaccttctgcacgatatcgcgatggtgcatagttggttctgtgttgcccttgtaactgtaccgcagactgtctcctgtctgatgttgcgtataattcgtggagagatgaagaatgttgccacgagtggcgtcaagactgactaaaacatacagtttttgtactgcgctggccccttgaaagggtatgaacagttgaacggtttcaatggcctggggatgcgtaatttctttctgatattttttaggcgtccagacttttttgcagttacggcattgaatgcgttgcgaaccctgtggattgtgaccataacaaatcatgtctgtgccataacataccgggcagaaatggcctttctcaattgcataagtagacaagtgaactgacaaccagtcacgaaattgttgctcgtcaaacaacggcgggtaactgccacatgcccgacagtgcagtgccggataacccagtttatagtctggccaactgtaatcttccgatgaggccaatcccaaatttcggcaaccgaacgttttacaggcattaatcgtaaacagagtcgacatatatcaccaacgatttcacaaggtcgttgattttgtccggcaactatcccctgcggatgtgattactctcacataaataagtctttcagaacgtaatgtagcaatcctttatctcactgaaagggattgtttatgaaaattaaaatacttgctgcgggtatcgcattaacactgccgttctgggcttgcgctaaagatgtcactatcatttataccaacgacctccatgcgcatgtagaaccttataaagtgccgtggatcgctgacggtaaacgggatattggcggctgggcaaatatcactacgctggttaagcaagaaaaagcaaaaaataaagcgacatggttttttgatgcgggcgactattttaccgggccatatatcagcagcctgaccaaaggtaaggctattatcgatattatgaatactatgccgtttgatgccgtcacaataggcaaccatgaatttgaccacggctgggacaacacattattacagttgagccaggcaaaattccctattgtgcagggcaatattttttatcagaacagcagtaaatcattctgggataagccatataccatcatcgaaaaagacggtgtgaaaataggcgttataggtttgcacggagtatttgcctttaatgatacggtatctgctgccacgcgcgtgggtattgaagcgcgcgatgaaattaaatggctacaacgttatatcgatgaactcaaaggcaaggttgatttgaccgtcgccctgatccacgaaggtgttccagcccgccagtccagtatgggaggcacagatgtgcgtcgcgcgttggataaagatattcagacggcaagtcaggtgaaagggctggatattttgatcaccggacatgcacatgtgggtacgccggaaccgattaaagtcggcaatacgctcatcctctccactgacagcggcgggattgatgtgggcaaactggttctcgactacaaagagaagccgcataattttacggtgaaaaacttcgagcttaaaaccatttacgctgacgagtggaagcccgatcagcaaacgaaacaggtgatcgacggctggaataaaaagcttgatgaagtggtgcaacaaacggtggcgcaatcgccggttgaattaaaacgtgcctatggtgaatcggcttccctcgggaacctggcggctgacgctttactggcagcagcgggtaaaaatacccaactggcgttaacaaactctggtggtatccgcaatgagatccccgcaggggcgattacgatgggcggcgtcatcagtacgttcccgttccccaacgaactggtgacgatggaactcacgggtaaacaattacgcagtctgatggaacacggcgcaagtttaagcaatggcgttttacaggtatcgaaaggcctggaaatgaagtacgacagcagcaagccggttggtcagcgggtaatcacactgactctgaatggcaaacccattgaagatgcgacggtttatcacattgctactcagagtttccttgctgatggtggagatggttttaccgcctttaccgaagggaaagcgcgtaacataacgggcggttattacgtttatcacgcggtggttgattacttcaaagcgggcaacaccattacggatgaacagctcaacggtatgcgcgtgaaggatatcaaataaaagtgcgcactgaattgactcaactgtttgttacccgttgattgcgcagatcctgtattcggcctacgcgagggcgcaggccaaatcagatgccttaacatcaccatccggtggcaggacgttgtttttcgaattagcccaggtgtcgctgtgttgtcagaatatgagtcaaaacgtgcgaggtggattgcgctatagagaaatcttttatcgcctctaattaagatgagttttt

SEQ ID NO: 316 - DNA, 858 bp, Escherichia coli
atgtatataaaaaagcactggatagctttatccattctattaataccttgcattggaaacgctcaggaaattaaaattgatgaaagctggttacatcaaagcttgaatgtcattggtcgcacagactctcgctttggcccaagactgactaacgacctctaccctgaatatactgtagcaggaagaaaagactggtttgatttttatggttatgttgatctaccgaaattctttggcgtcggcagtcactatgatgttgggatctgggatgagggctcaccactatttacggaaatagaacctcggttttccattgacaaattgaccggattaaatcttgcgttcggcccatttaaagaatggttcattgcaaacaactatgtctatgatatgggtgacaaccagtcatcccggcaaagtacatggtatatggggcttggtacagatatcgacacgggtctaccaattaagctttctgccaatatatacgccaagtatcagtggcaaaactatggtgccgctaatgaaaatgaatgggacggatatcgattcaaaataaaatatagcatccctcttacaaatttattcggaggacgattggtatacaatagttttactaactttgattttggctccgatcttgcggacaagtcacacaataataaacgaaccagtaatgctattgcttcaagccatatcctttcccttctatatgaacactggaaatttgcatttacactacgttattttcacaacggtggacaatggaatgcgggagagaaggttaacttcggagatggtccatttgaattaaaaaatacaggatggggaacctatactactattggttatcaattt

SEQ ID NO: 317 - protein, 286 aa, Escherichia coli
MYIKKHWIALSILLIPCIGNAQEIKIDESWLHQSLNVIGRTDSRFGPRLTNDLYPEYTVAGRKDWFDFYGYVDLPKFFGVGSHYDVGIWDEGSPLFTEIEPRFSIDKLTGLNLAFGPFKEWFIANNYVYDMGDNQSSRQSTWYMGLGTDIDTGLPIKLSANIYAKYQWQNYGAANENEWDGYRFKIKYSIPLTNLFGGRLVYNSFTNFDFGSDLADKSHNNKRTSNAIASSHILSLLYEHWKFAFTLRYFHNGGQWNAGEKVNFGDGPFELKNTGWGTYTTIGYQF

SEQ ID NO: 318 - DNA, 1623 bp, Escherichia coli
atgcgaatgaaaacagcgcagcgtactttatttgccgcaacattgctgactattttttcgacctcagttatggcgcaggatgtcacgattatttataccaatgatcttcacgctcatgtggattcctataaagtaccgtatgtcgcagacggaaaacgcgacattggtggctttgccaatatatccacgttagtaaaacaagagaaagccaaaaataaagccaccttttattttgatgctggagactatttcaccgggccatatatcagtagcctgacaaagggcgaagcaataattgatattatgaataccatgccttttgacgcagtatcaatcggtaatcatgagtttgaccatggctgggataatgccctccgacaattaagcaaagcgaatttccctgttttattaggcaatgtttatcataaagagagtgagaaacccttctggaacaagccctacaccatcctggaaaaagatggcatcaagattggtattgttgggctacacggcgtatttgcatttaatgacacggtctcggagctctctctccagggactcgataatgacaataataaccgatttgataaatcttccgcgaccctcaagaatcaggggattgaagcacgtgatgaagtgaagtatttgcagcattatatcgatgagttacgtgataaggttgacctcaccgtggcgctggttcatgaaggcgtaccggcgcgtcagtccagcattggcaatacagatgttagacgtgcgctggataaagatattcaaaccgcaagcaaggtgaaaggattggatattctgattaccgggcatgcccacgtcggaacgccagaaccaatcaaagtcggcaacaccttaatcctttcgactgacagtggcggtatcgatattggtaaattaatccttgatgtcaaccctacagctcgtactcataaagtgaagagctttgagctgaaaacggtttatgccgatgaatggatacctgatccaaccacacaaaaagttatcaatggctggaataaaaaactggcggatcttgtacgccaaccagtcggtgaatcatcgattgcattaactcgtgcctacggtgagtcatcgcaacttggcaacctgtttaccgatgcaatgcttgtcgctgcaccgactgcacaaattgcgttgataaactccggcagtttacgtgctgatataaatgcaggcacgattacctttggtgacattaccagtacattccccttcaagaatgaacttactgaaatggatctcagcggtaaggatctgcgtaacctactggaacacggggcatcgcttaccaatggcatcctgcaaatgtcaaaaggcgcagaaatgcgctataccctgcagaaaccagtaggtcagcgcattgtatcttttaaaattaatggtgaagagatcgttgatacgaatatttaccatgttgcgactacgactttccttgcacttgggggcgatggttttctggcattcaaagaagggaaaaatgtccaggtccgcgccggaaataacatgtccaatgtcgtaatcgattattttaagaaaggccacaagattactcctgcacaggtaaatgaaatgcgggtagaagtaagcaaa

SEQ ID NO: 319 - protein, 541 aa, Escherichia coli
MRMKTAQRTLFAATLLTIFSTSVMAQDVTIIYTNDLHAHVDSYKVPYVADGKRDIGGFANISTLVKQEKAKNKATFYFDAGDYFTGPYISSLTKGEAIIDIMNTMPFDAVSIGNHEFDHGWDNALRQLSKANFPVLLGNVYHKESEKPFWNKPYTILEKDGIKIGIVGLHGVFAFNDTVSELSLQGLDNDNNNRFDKSSATLKNQGIEARDEVKYLQHYIDELRDKVDLTVALVHEGVPARQSSIGNTDVRRALDKDIQTASKVKGLDILITGHAHVGTPEPIKVGNTLILSTDSGGIDIGKLILDVNPTARTHKVKSFELKTVYADEWIPDPTTQKVINGWNKKLADLVRQPVGESSIALTRAYGESSQLGNLFTDAMLVAAPTAQIALINSGSLRADINAGTITFGDITSTFPFKNELTEMDLSGKDLRNLLEHGASLTNGILQMSKGAEMRYTLQKPVGQRIVSFKINGEEIVDTNIYHVATTTFLALGGDGFLAFKEGKNVQVRAGNNMSNVVIDYFKKGHKITPAQVNEMRVEVSK

SEQ ID NO: 320 - DNA, 1551 bp, Escherichia coli
atgatgaaaactgtatttacaacattatcagtcatattcggcgtgatattttctcacagtgttctagctcaggacgttactatttattatacgaatgacattcacgcacatgtcaatccggcaaaaatcatcgctgttgataagaacagacttataggtggtatggctaatattgcaggcatcgttaatgaagcgaagaaaaaaagcaaagatgtgtttttctttgatgcaggcgactattttaccgggccgtatatcagcaccctgaccaaaggtgaagctattattgatatcatgaacactatgccctttgatgcggtgtctgttggtaatcacgagttcgatcacggtgtgcccaatatggtgtctcagttatcaaaagcaaaattccccattctgctgggaaatatctactacaccgatacgaataaaccagtttgggatcatccgtggaccattatcgaaaaagatggtttaaagattggtgtgattggattgcatggcgcattcgctttctatgatacagtcgcggcaaaagcacgtgaaggcgtagaagccagagacgaaattaaatatttaaataaagcacttgcagaattaaaaggtaaagtcgacattaccgttttgctaattcacgaaggtgtcccggcgcgtcaatcaagctttggtagtaaagatgtggagcggctactacaggcagatattgagacagctaaaaaagtgaatggtgttgatgtcttaattaccggtcacgcacatgtcggaacaccgcaaccaataaaagttaataacacattaattgtatctaccgatgcatacggcaccaacatcggaaaacttgtgcttgattacaatccgaaaacgaagaaaattgatagttataatggtgagttaatcaccatctttgcagatcaatttaaacctgacaccatcgttcaaaatactattgataaatggagtgcaaagcttaacaaaataacaaaggaagttgtcggccattctcccgtagttttaacacgtgagtatggtagttcctcttctaccggcaaccttattcttgatgcaatgatggaaaaaacacctgatgccgttgccggatttcaaaatagcggtgggatgcgagctgattttcctaaaggcgatatcacactgggagatgttattagcacattcccctttaataatgacctcatcgagatggatttgacgggccgcgatctcaaatcattgatgacgcatgcaaccaatctaactaacggtgtgttacaagtttctaaaagtgttgcggttgtctatgacagcaaaaaaccactcaaccaacggttaatctctttcaccattaacggcaaacccgtggaagataatcaaacatatcgtattgccacgcactccttttgtgccagtggtggtgacggttttgaagcatttttgaatggaaaaaatgtgaagacgataccgggaacaacctcggcggaatctatcatcgattatttcaaaaatcataaacctgtcaccccagacttaactaaacgagtcatggacgtcgccaaa

SEQ ID NO: 321 - protein, 517 aa, Escherichia coli
MMKTVFTTLSVIFGVIFSHSVLAQDVTIYYTNDIHAHVNPAKIIAVDKNRLIGGMANIAGIVNEAKKKSKDVFFFDAGDYFTGPYISTLTKGEAIIDIMNTMPFDAVSVGNHEFDHGVPNMVSQLSKAKFPILLGNIYYTDTNKPVWDHPWTIIEKDGLKIGVIGLHGAFAFYDTVAAKAREGVEARDEIKYLNKALAELKGKVDITVLLIHEGVPARQSSFGSKDVERLLQADIETAKKVNGVDVLITGHAHVGTPQPIKVNNTLIVSTDAYGTNIGKLVLDYNPKTKKIDSYNGELITIFADQFKPDTIVQNTIDKWSAKLNKITKEVVGHSPVVLTREYGSSSSTGNLILDAMMEKTPDAVAGFQNSGGMRADFPKGDITLGDVISTFPFNNDLIEMDLTGRDLKSLMTHATNLTNGVLQVSKSVAVVYDSKKPLNQRLISFTINGKPVEDNQTYRIATHSFCASGGDGFEAFLNGKNVKTIPGTTSAESIIDYFKNHKPVTPDLTKRVMDVAK

SEQ ID NO: 322 - DNA, 1101 bp, Escherichia coli
atgtcgactctgtttacgattaatgcctgtaaaacgttcggttgccgaaatttgggattggcctcatcggaagattacagttggccagactataaactgggttatccggcactgcactgtcgggcatgtggcagttacccgccgttgtttgacgagcaacaatttcgtgactggttgtcagttcacttgtctacttatgcaattgagaaaggccatttctgcccggtatgttatggcacagacatgatttgttatggtcacaatccacagggttcgcaacgcattcaatgccgtaactgcaaaaaagtctggacgcctaaaaaatatcagaaagaaattacgcatccccaggccattgaaaccgttcaactgttcataccctttcaaggggccagcgcagtacaaaaactgtatgttttagtcagtcttgacgccactcgtggcaacattcttcatctctccacgaattatacgcaacatcagacaggagacagtctgcggtacagttacaagggcaacacagaaccaactatgcaccatcgcgatatcgtgcagaaggtagatatgcgtgaagcgcaattcttgcgccggagccagttcgatgaaattcagtatggcagtgctgtactcaagcgcaacggtaagggagccatactacgcccggttatcacggcacacgggcatttcagaatactgaaaatccgctatccagatgtcaaaacgcatattatttcacacgaatgttttctaagaggcgcaattattacagcctgggcagatcagttccgccaacaacaaggtgaactttggttcgtagaagaagaaatcagtgacagtaacgctgatacgccctggcattttaagggaacgacataccatggttggtggcaaaatcagtggcagcgctgggagcaggggaataattgcaagatggtctgcctactcacgggagccagcttagaaaggggcgcaaatgtttctctggcaaccagtccgttgttttatcacatggctgacagaccaacacgactttacccaaagcgcgttattatccgcaggtcgcgtaacgcaaatgctgacctcactggcgttaaaatacaa

SEQ ID NO: 323 - protein, 367 aa, Escherichia coli
MSTLFTINACKTFGCRNLGLASSEDYSWPDYKLGYPALHCRACGSYPPLFDEQQFRDWLSVHLSTYAIEKGHFCPVCYGTDMICYGHNPQGSQRIQCRNCKKVWTPKKYQKEITHPQAIETVQLFIPFQGASAVQKLYVLVSLDATRGNILHLSTNYTQHQTGDSLRYSYKGNTEPTMHHRDIVQKVDMREAQFLRRSQFDEIQYGSAVLKRNGKGAILRPVITAHGHFRILKIRYPDVKTHIISHECFLRGAIITAWADQFRQQQGELWFVEEEISDSNADTPWHFKGTTYHGWWQNQWQRWEQGNNCKMVCLLTGASLERGANVSLATSPLFYHMADRPTRLYPKRVIIRRSRNANADLTGVKIQ

SEQ ID NO: 324 - DNA, 1557 bp, Escherichia coli
ttgtttatgaaaattaaaatacttgctgcgggtatcgcattaacactgccgttctgggcttgcgctaaagatgtcactatcatttataccaacgacctccatgcgcatgtagaaccttataaagtgccgtggatcgctgacggtaaacgggatattggcggctgggcaaatatcactacgctggttaagcaagaaaaagcaaaaaataaagcgacatggttttttgatgcgggcgactattttaccgggccatatatcagcagcctgaccaaaggtaaggctattatcgatattatgaatactatgccgtttgatgccgtcacaataggcaaccatgaatttgaccacggctgggacaacacattattacagttgagccaggcaaaattccctattgtgcagggcaatattttttatcagaacagcagtaaatcattctgggataagccatataccatcatcgaaaaagacggtgtgaaaataggcgttataggtttgcacggagtatttgcctttaatgatacggtatctgctgccacgcgcgtgggtattgaagcgcgcgatgaaattaaatggctacaacgttatatcgatgaactcaaaggcaaggttgatttgaccgtcgccctgatccacgaaggtgttccagcccgccagtccagtatgggaggcacagatgtgcgtcgcgcgttggataaagatattcagacggcaagtcaggtgaaagggctggatattttgatcaccggacatgcacatgtgggtacgccggaaccgattaaagtcggcaatacgctcatcctctccactgacagcggcgggattgatgtgggcaaactggttctcgactacaaagagaagccgcataattttacggtgaaaaacttcgagcttaaaaccatttacgctgacgagtggaagcccgatcagcaaacgaaacaggtgatcgacggctggaataaaaagcttgatgaagtggtgcaacaaacggtggcgcaatcgccggttgaattaaaacgtgcctatggtgaatcggcttccctcgggaacctggcggctgacgctttactggcagcagcgggtaaaaatacccaactggcgttaacaaactctggtggtatccgcaatgagatccccgcaggggcgattacgatgggcggcgtcatcagtacgttcccgttccccaacgaactggtgacgatggaactcacgggtaaacaattacgcagtctgatggaacacggcgcaagtttaagcaatggcgttttacaggtatcgaaaggcctggaaatgaagtacgacagcagcaagccggttggtcagcgggtaatcacactgactctgaatggcaaacccattgaagatgcgacggtttatcacattgctactcagagtttccttgctgatggtggagatggttttaccgcctttaccgaagggaaagcgcgtaacataacgggcggttattacgtttatcacgcggtggttgattacttcaaagcgggcaacaccattacggatgaacagctcaacggtatgcgcgtgaaggatatcaaa

SEQ ID NO: 325 - protein, 519 aa, Escherichia coli
LFMKIKILAAGIALTLPFWACAKDVTIIYTNDLHAHVEPYKVPWIADGKRDIGGWANITTLVKQEKAKNKATWFFDAGDYFTGPYISSLTKGKAIIDIMNTMPFDAVTIGNHEFDHGWDNTLLQLSQAKFPIVQGNIFYQNSSKSFWDKPYTIIEKDGVKIGVIGLHGVFAFNDTVSAATRVGIEARDEIKWLQRYIDELKGKVDLTVALIHEGVPARQSSMGGTDVRRALDKDIQTASQVKGLDILITGHAHVGTPEPIKVGNTLILSTDSGGIDVGKLVLDYKEKPHNFTVKNFELKTIYADEWKPDQQTKQVIDGWNKKLDEVVQQTVAQSPVELKRAYGESASLGNLAADALLAAAGKNTQLALTNSGGIRNEIPAGAITMGGVISTFPFPNELVTMELTGKQLRSLMEHGASLSNGVLQVSKGLEMKYDSSKPVGQRVITLTLNGKPIEDATVYHIATQSFLADGGDGFTAFTEGKARNITGGYYVYHAVVDYFKAGNTITDEQLNGMRVKDIK

SEQ ID NO: 326 - DNA, 9136 bp, Escherichia coli
agcgaaaaaatggttttgcgtaagatattggggcgttttctgcgctactgccagcagatcctcgcgctggaaacgtaaggccaaacgtcgccagcctgacgcatttattaaattgccggatgagctggccgcagagtcatagattagtcggctatgattaaacgcgtcgacaaggacgcaagcgttctacgcgtctgcccatcaagctgactatccgtaataatctctgtcagttcattaagatgcgcgatattaaacagcgaccatgaaccgtattttgagctgtcagccaggagaattttgcgcgaagcatgcgcgataagatcgcgttttagtgcggctttctcttccgtgggtgctgtaatacccttttcaagatcccagctgttacagcttaaaaatgccacgtccggccaggtattttgcagcaatttacgaccatgttcgccaatgcaggactggctggagtcgtcgatacgtccgccgataatcgtcacttcaatttgcttgaattcagccaaaaaaagcgcgatatgcaggtcgctggtgatcacgcgaagcggtaaatgtgtaatctgccgcgcaagttcaatcattgtcgtaccggcatcaaggacgacggaatcccccgctttgaccattgacgccgctgcgctggcgatggcatgtttttccgccaggctgcgctgcattttctcatgggtagtcggttgggtaggaataaaccggttgagggtcacaccgccatgtgtacggctgataacaccctgctcatcgagttttatcaggtctcgacgaatcgtagccggcgacgcattggttaccgccaccagctcatcaacggtgaccagattatggcttttcaggtaatccatgatctgctctaaccggttatatcccttcattttattctcgcgaaatctgcattgctaactggatggaaactgccatgctctcagacttggcttttcctgtccaggcaatatcaaacgcggtgccgtggtcggcagaagtgcgaataaatggcaacccggcggtgatattcaccccatcataaaatccaagcagttttaaagggatatgcccctgatcgtggtacatagccactaccatatcgaatagcccttcatggcattgcataaacacggtatctggcgggcacgggccagtaacatcaatatcttcggcctgcattgcttcaatcgcaggcgcgataatctcgatttcctcagtgccgaataaaccatgttcccctgcatgtggatttacacccgccacggcaatacgcggacgttcaataccaacacgtttcaggaagtggttcgcaacacgaataaccgttttgaccctttcaccattcaaggtatccaggaatttacgcagtgagatgtgagtcgaaatatggataaccttgagcttatcggtatagagcaccatcgcgtactctttgctgccggtaagatgggccagcaattccgtatgccccggatagttatgcccgccaagatgcagcgcttctttattcagcggcgcagtggctatggctttcacctcgcctgataaggccagagccgttgcacgtttgatacagcgatacggtaaatcgcctgccgcagcctgtccactccgggtgcagcgcatcggggttagccagcggctcatccatcacgttaatcacgccgggagcaaaatgggcgtcgcacaccttttgaatgacgcgtaactctgcctgcggcgtgatattcatcgccataatacgtcgcagcgtgcgcacacagcccaccaccaccaccggggcaccagcaagcccggcttcgctcagggatttaataatgatctccgggccaatacccgccgggtcacccatcgttaccgcaataatattattcactacacttctcctcgataaaattcagaacctgatgcaacgtggtctcatcgccaaacccaccggctttcgtcatcaccgaacgggaccagacaccgcccagaaagtgaccgtatggaacgcattgcgccaccttccccgtaatacgaaatccggtcgcgcctaacgcactggctgttgccattgcgacatcaccaccagagagataaagcgcatcgggcattgtgcgaagcagaacttgccgggtaagttcgccaagaaaccgacaaattttttccccaagtgcagcgcgactcatctgccaacgctggcaaagggtgtcgatctgatgccttgctacagaatcgttacaggtgtggacaatgcagtggtcgcctttctgcaaggcctgcacaatacgcgcgtcatagtcactggcattgcctgccagaatgtgttcaacatcgacgtatatctgtgtgatacatgggtgtgaatgaagtgtggcgatctgccgttgagcgatttcgctcattgaaccaataatggccagcacggtgggtggcggcataatcgcggagcgccgggcaacggcatcacaaataccagcggagccgaccagcagcagcggttgtttagcctgcatcacagcggcagcgatgcgatccaggtcgctgtccgtctgcgcatctatcacgctaatccacggttgctcataagacaaatggctgagctgagaaaccgtaacgggctggcatggaatggccgtctgcaaccggatgatgtccgcaattcgggcgctcaataccggggttttcggatcgctggcaaactcggtttccgttatccgcacaccgtttacccaacactcaccggccactgtggtccttcccgcctgaggaaatgcgggggcaaccactgcgcccgttataccgcatgccttcatcagggcttcaatttctgcgccgatattgcctcgcagcgtggaatctatctttttaatcacgagcggcggattattcgccagagggagatgactcatcagcgaggttattttcatcgccgccagcttaggatccatcgcccgactgtcgctgttaatcacccatacgctggcatcaccgcgataatgcatttcaaaggccacatcaactgtatgccccacctgcgccaggcttacccccgcgtcgttggctcccgtgaaatcatcggcaacgacgagaatgctcggcttagtgattcccttttccatcatcactccaggttgttttatgataacaatgattatattcaatcacaattgattaaatgtgagcaagctcaagttattaatcactcgaataaattataaaattagaccatattacgtaggctacggcattttgaatgattgaattcaatcaacagaagagaggttatttgtggtaattatcaatagcacgatactgagcggcgcaggcgctatcccttccctgacgtcgctcttacccgacatcagaaaaatgctgctggtcactgaccgtaatattgcgcagctcgacggtgtgcagcagattcgcgccttactggaaaagcactgcccgcaggttaacgttatcgataatgtgcccgcagagcccacgcatcatgatgtgcgccagctaatggatgcccctggcgatgcctcttttgatgtggtggtcgggatcggcggtggcagcgtgttggatgtggcgaagctgctatcggtgctttgccatccacaatcaccggggctggatgcgctgcttgcgggtgaaaaaccgactcagcgggtgcaatcatggttgattcctacaaccgccggaaccggctcagaagccacgccgaatgcgattctggcaatccctgagcaaagcacgaaggtgggtattatttcccaggtgctgttaccagactatgtggcgcttttcccggaactgaccaccagcatgcccgcgcatattgcggcgtccacgggcattgatgctctttgccacttactggagtgttttaccgcgaccgtggcaaatccggtcagcgataacgcggcgctgactgggttaagtaaacttttccggcacattcaacccgccgtgaacgatcctcaggatctgcgcgcaaaactggaaatgctgtgggcgtcttactatggcggcgtagcgataacccatgcgggcacgcatctcgttcatgcgctctcctacccgttaggtggcaaatatcatctgccgcatggcgtcgcgaatgccatcttgctggcgccgtgcatggcgtttgttcgcccctgggcggtcgagaaatttgcccgggtctgggattgcattcccgatgcggaaaccgccctgagcgcggaagaaaaatctcatgccctggtgacctggttacaggcattagtcaatcaactcaagctacccaacaatctcgcggctctcggcgtaccgccagaggatattgcctctctgagcgaggcggcactgaacgtgaagcgccttatgaacaatgtgccgtgccaaattgatctacaggacgtacaggccatttaccaaacactgtttccgcaacatccatttaaggagtaaatcatgccgaaaaccattgaaggtgtattaaccgccattgtcaccccgtttaccgcgaccggcagtctgaatatcccggcgttaaaagtgcaggtgaatcgtcaactggaagcgggtaacgcgattttttgcggcggcaccaacggcgagttttttgtgttgaatgaacaggagaagctcagcgttacgcaaacctgcgtggatgaagtggctggtcgtgcgccggtcgtggcacacattggcgagatctctacgcgcgaaacgattcgtctgggtcagcagattgaaaaacttggcgtagatgccgtgtcggtcattgccccttacttcgtaccgctgaaacaggaagagttgattgcgcattacagcgcaattgccgacgcactgagcattccgatgtttctctataacatcccggcccgcactggcaatacgatccagccagaaaccgcgcgtgctctggcgtcgcaccccaatatcattgggattaaagacagcgccggaagcgacgaaagcctgaagggttttctcgatgcggtgcgcgacattgacggctttaatgtgctcaacggcccggattcgctgatccataaagggtttgtcgagggatgttcaacctgtatctctgggctcgccaacatcgcgccgcgagaaatcaatgccatctggtctcgcttccatgccggtgatattgaagggtcttatgaagcacaggagagtgtaacgggcctgcgtaccgatctttataaagtagcattctccccggctgcggtgaaaaaagcgttgcagcttatggggcatgatgttggtgatagccgctacgcggttaatttcacgcctgaacagatcagcgagattcaacaaattattcgtcattataacattaattaaattaactctattatccagcccgctataaagtttagataaagagaataaaggattaccccatgtttttgtggtttatgcagccagatatctggctcactttaattaccctcacctttctggaaattattcttggggtggataatattatttttctttcactggtggtggcaaaacttccgttatcacaacaaaatatggcgcgtaaactgggtttaagctgcgcgatgattatgcggatattattgctgatatccattgcgtggctttcacatattacccagccgctttttaccgtgctgacgctggagatttcgttccgcaccttgattctgctcgggggcgggctgttcctgatttataaagcgatacaggagatacgcgaagagctgtcgcccgcgcaggaagacgaacatggcagcggatcgcggcaactgtcgttgtgcggtgccattgtacagataatgctgctcgatatcgtgtttagcctggattcggtgatcaccgccgtcggcctttctcagcatatatttatcatgattgccgccgtaatgattgccgtcggtgtcatgatgtttgcggcgaaaacaattggtgatttcgttaacgccacgccgtcaataaaaatactggcgttaacctttttattgtttgtcggtgtattgctggttgccgatagtctcaacattcatattgccaaagagtatctctacttcgcgatatttttctcattaagtgttgagacactcaatattatccgtgaaagaaaaaataaaaaagtttcgacattgctcgaaacgcatgaatcgcactcgcattaataaatctattaccaactttaagatggagtctaactatgtctgtagcccttattcgtgacggcgtcatccgtccatccgaaaacgattcgcatgtgcttaccgccatgctgccctcgtcctgcccgcaaaaccacgcggcgaatattctgcctttgccggatggcgcgttaatgtgcgtctggtttgcgggaacgcaggaaggtattgccgatatttctgtctggggatcgcgattgcccgctggcggaatgcagtggagcgatgcggtcaaactttcccacgatgacacgcgttcagagcaaaacccggtgctgtttctcgcgccggataacgtgctgtggctcctatggaccgcacaaatatccggtaatcaggacaccgccatcgtccgctaccgtaagtcagacgacctcggacaaacctggggcgagattgccaccctgcttgataaacccggtacgttcattcgacagccaatcacggtgcttgataacggcaactggctgctgcccgtcttttattgccgtacccaacccggcgaaaaatgggtcggcaatgatgatatcagcgcagtgaaaatttccgctgacggtggtcactcctggcgcgatgtcgaggtgccgcaaagtcttggctgtgttcatatgaatatcacaatgctgcacaacggtacgttggttgctctctttcgcagccgttgggcagacaacatctatatcagccattccgcggacaacggcgagagctggtcagtaccgcaagcaaccgaattgcccaacaacaattcgtctattcaggtaacgacacttgccagcggcgaactggcgctggtgtacaacgcgatgagtgcggcaggcgcagtagaacgtcgcgcgtcgctttatgacgaaatcgacgatggcgacgacagccgcaaagaaccgacagccgtcggacgctccgctttctggggggccccacgcgcgccgatgacggtagcgatttctgccgatggtgggaaaagctggccgtggcggcgcaatctcgatgaaggcgacggctactgcatgaccaacaattccctggaaaagctaaatcgtgagttctcctaccccagcatcaaacaaagcccggacggtacgctacatatcgcttacacctggtggcgtcaggccatcaagtacgtacgcatctcccccgagtgggttaaggggcaggcatcatgattatcggtaatctcaaccatttgtcgctggcggggcttcctgcctgggtgagaaatattctgctgcgcccggagtgttcgttatcggcgttatccaccagagaggacggtcgctggcaacctgaaggatgtcggtggttctgcacgctgggaacttcagacacgcaacccgccgaactccgccatacggagtatcaccatctatgggccgatatacaggtggtgattactggttgtgagggcattaatgcgggaacgcggcccatcgctcgcgaaaacgatgaagaacgtaagcccgatctgtttatcgccccatcccctgaaaacagtgtcgccatcaccctacacgccggtgatttcgccgtctttatgcctgaggaacctcaccaggcgctgtgcgcaattggcacggctacttcaatacgcaaagcggtctttaaagtaccgcgcgacatgctggaagcctaaaaggagagaaaaaatgacaatggaaatgatcctggcattaggaatactggtcctgatgatcgtgctgatcatgtcggacaaaatgccttttggcgcaccgccactgcttgcgtgtttattgctggttgtatcgggactttcgaccgttcaacaggcttttgccggattcgtcaatccaagcgtggtgatgattgcagggtttatggtggtcatggcggcgctacaaaaaacccggcttatcagcaacgttaaatctgcgatgataagcctggtcaataaaggcagttaccgcagctatgggctgttgttagtcattgttatgctgggtgccagtcttgccggcaccggagcgaccggttattacgtgctaattctgtcgctggtatccaccattccgtacagtaaaaagctaccaacatcgaaattaatgatgcccctgggatttgccaccaaccacccgcttcttcctatcaatctcgcgcttctctttggcgttacggcgaccgtactcgaaaccgcggggtttcatcaggagatttcgatggggcgctttgcgctggtgaatctcatcatgtcagcggctttcctcgcatggagtcttattgcctaccgttttcttccggatcatcccattgcggatgcttccgaggatgcgctggcggcacgcgaggaaacgtttaacgcccttcctgcctggaaagaatattgcactattgccgcattcgctgtcagcgttatcggcatgatgctaatgaacattctgggaaatatcgccttcgttattccgggtcttgcgggtgcgtttgttctgatgatcgatgtactggacttcaaagaagttcgcgatcatatgggggctccggtcattttaatgatggcgggggtgatcggtgtagctgatgcactggcgggcaccggctttacggcgatggttggcgatgccgttgcaggtgtgctcggttctggcgtctcaccgtttgtatttattgtcgcctttgctttgcttaccagtacctgcgccaccttcacgggttcgaatatggggtcagtatatatttttgcccccatcgccattgccgcctgtactagccttgggcttaacccgaccgctgccgcgattgcggtggtgatttctggctggaatggcggctatatgcctattgacggaatgccagccatgatcctcggaatggggaaatacaaacttcccgaattctgggtgttctctgtaccaatgtatctcatccgcattctggcgctttgtgcaggcgctgtttttatcttcccaatgtaatctcagacaaaaaaa

SEQ ID NO: 327 - DNA, 759 bp, Escherichia coli
atgaagggatataaccggttagagcagatcatggattacctgaaaagccataatctggtcaccgttgatgagctggtggcggtaaccaatgcgtcgccggctacgattcgtcgagacctgataaaactcgatgagcagggtgttatcagccgtacacatggcggtgtgaccctcaaccggtttattcctacccaaccgactacccatgagaaaatgcagcgcagcctggcggaaaaacatgccatcgccagcgcagcggcgtcaatggtcaaagcgggggattccgtcgtccttgatgccggtacgacaatgattgaacttgcgcggcagattacacatttaccgcttcgcgtgatcaccagcgacctgcatatcgcgctttttttggctgaattcaagcaaattgaagtgacgattatcggcggacgtatcgacgactccagccagtcctgcattggcgaacatggtcgtaaattgctgcaaaatacctggccggacgtggcatttttaagctgtaacagctgggatcttgaaaagggtattacagcacccacggaagagaaagccgcactaaaacgcgatcttatcgcgcatgcttcgcgcaaaattctcctggctgacagctcaaaatacggttcatggtcgctgtttaatatcgcgcatcttaatgaactgacagagattattacggatagtcagcttgatgggcagacgcgtagaacgcttgcgtccttgtcgacgcgtttaatcatagccgac

SEQ ID NO: 328 - protein, 253 aa, Escherichia coli
MKGYNRLEQIMDYLKSHNLVTVDELVAVTNASPATIRRDLIKLDEQGVISRTHGGVTLNRFIPTQPTTHEKMQRSLAEKHAIASAAASMVKAGDSVVLDAGTTMIELARQITHLPLRVITSDLHIALFLAEFKQIEVTIIGGRIDDSSQSCIGEHGRKLLQNTWPDVAFLSCNSWDLEKGITAPTEEKAALKRDLIAHASRKILLADSSKYGSWSLFNIAHLNELTEIITDSQLDGQTRRTLASLSTRLIIAD

SEQ ID NO: 329 - DNA, 966 bp, Escherichia coli
gtgaataatattattgcggtaacgatgggtgacccggcgggtattggcccggagatcattattaaatccctgagcgaagccgggcttgctggtgccccggtggtggtggtgggctgtgtgcgcacgctgcgacgtattatggcgatgaatatcacgccgcaggcagagttacgcgtcattcaaaaggtgtgcgacgcccattttgctcccggcatgagccgctggctaaccccgatgcgctgcacccggagtggacaggctgcggcaggcgatttaccgtatcgctgtatcaaacgtgcaacggctctggccttatcaggcgaggtgaaagccatagccactgcgccgctgaataaagaagcgctgcatcttggcgggcataactatccggggcatacggaattgctggcccatcttaccggcagcaaagagtacgcgatggtgctctataccgataagctcaaggttatccatatttcgactcacatctcactgcgtaaattcctggataccttgaatggtgaaagggtcaaaacggttattcgtgttgcgaaccacttcctgaaacgtgttggtattgaacgtccgcgtattgccgtggcgggtgtaaatccacatgcaggggaacatggtttattcggcactgaggaaatcgagattatcgcgcctgcgattgaagcaatgcaggccgaagatattgatgttactggcccgtgcccgccagataccgtgtttatgcaatgccatgaagggctattcgatatggtagtggctatgtaccacgatcaggggcatatccctttaaaactgcttggattttatgatggggtgaatatcaccgccgggttgccatttattcgcacttctgccgaccacggcaccgcgtttgatattgcctggacaggaaaagccaagtctgagagcatggcagtttccatccagttagcaatgcagatttcgcgagaa

SEQ ID NO: 330 - protein, 322 aa, Escherichia coli
VNNIIAVTMGDPAGIGPEIIIKSLSEAGLAGAPVVVVGCVRTLRRIMAMNITPQAELRVIQKVCDAHFAPGMSRWLTPMRCTRSGQAAAGDLPYRCIKRATALALSGEVKAIATAPLNKEALHLGGHNYPGHTELLAHLTGSKEYAMVLYTDKLKVIHISTHISLRKFLDTLNGERVKTVIRVANHFLKRVGIERPRIAVAGVNPHAGEHGLFGTEEIEIIAPAIEAMQAEDIDVTGPCPPDTVFMQCHEGLFDMVVAMYHDQGHIPLKLLGFYDGVNITAGLPFIRTSADHGTAFDIAWTGKAKSESMAVSIQLAMQISRE

SEQ ID NO: 331 - DNA, 1275 bp, Escherichia coli
ttgaatataatcattgttatcataaaacaacctggagtgatgatggaaaagggaatcactaagccgagcattctcgtcgttgccgatgatttcacgggagccaacgacgcgggggtaagcctggcgcaggtggggcatacagttgatgtggcctttgaaatgcattatcgcggtgatgccagcgtatgggtgattaacagcgacagtcgggcgatggatcctaagctggcggcgatgaaaataacctcgctgatgagtcatctccctctggcgaataatccgccgctcgtgattaaaaagatagattccacgctgcgaggcaatatcggcgcagaaattgaagccctgatgaaggcatgcggtataacgggcgcagtggttgcccccgcatttcctcaggcgggaaggaccacagtggccggtgagtgttgggtaaacggtgtgcggataacggaaaccgagtttgccagcgatccgaaaaccccggtattgagcgcccgaattgcggacatcatccggttgcagacggccattccatgccagcccgttacggtttctcagctcagccatttgtcttatgagcaaccgtggattagcgtgatagatgcgcagacggacagcgacctggatcgcatcgctgccgctgtgatgcaggctaaacaaccgctgctgctggtcggctccgctggtatttgtgatgccgttgcccggcgctccgcgattatgccgccacccaccgtgctggccattattggttcaatgagcgaaatcgctcaacggcagatcgccacacttcattcacacccatgtatcacacagatatacgtcgatgttgaacacattctggcaggcaatgccagtgactatgacgcgcgtattgtgcaggccttgcagaaaggcgaccactgcattgtccacacctgtaacgattctgtagcaaggcatcagatcgacaccctttgccagcgttggcagatgagtcgcgctgcacttggggaaaaaatttgtcggtttcttggcgaacttacccggcaagttctgcttcgcacaatgcccgatgcgctttatctctctggtggtgatgtcgcaatggcaacagccagtgcgttaggcgcgaccggatttcgtattacggggaaggtggcgcaatgcgttccatacggtcactttctgggcggtgtctggtcccgttcggtgatgacgaaagccggtgggtttggcgatgagaccacgttgcatcaggttctgaattttatcgaggagaagtgtagtgaa

SEQ ID NO: 332 - protein, 425 aa, Escherichia coli
LNIIIVIIKQPGVMMEKGITKPSILVVADDFTGANDAGVSLAQVGHTVDVAFEMHYRGDASVWVINSDSRAMDPKLAAMKITSLMSHLPLANNPPLVIKKIDSTLRGNIGAEIEALMKACGITGAVVAPAFPQAGRTTVAGECWVNGVRITETEFASDPKTPVLSARIADIIRLQTAIPCQPVTVSQLSHLSYEQPWISVIDAQTDSDLDRIAAAVMQAKQPLLLVGSAGICDAVARRSAIMPPPTVLAIIGSMSEIAQRQIATLHSHPCITQIYVDVEHILAGNASDYDARIVQALQKGDHCIVHTCNDSVARHQIDTLCQRWQMSRAALGEKICRFLGELTRQVLLRTMPDALYLSGGDVAMATASALGATGFRITGKVAQCVPYGHFLGGVWSRSVMTKAGGFGDETTLHQVLNFIEEKCSE

SEQ ID NO: 333 - DNA, 1155 bp, Escherichia coli
gtggtaattatcaatagcacgatactgagcggcgcaggcgctatcccttccctgacgtcgctcttacccgacatcagaaaaatgctgctggtcactgaccgtaatattgcgcagctcgacggtgtgcagcagattcgcgccttactggaaaagcactgcccgcaggttaacgttatcgataatgtgcccgcagagcccacgcatcatgatgtgcgccagctaatggatgcccctggcgatgcctcttttgatgtggtggtcgggatcggcggtggcagcgtgttggatgtggcgaagctgctatcggtgctttgccatccacaatcaccggggctggatgcgctgcttgcgggtgaaaaaccgactcagcgggtgcaatcatggttgattcctacaaccgccggaaccggctcagaagccacgccgaatgcgattctggcaatccctgagcaaagcacgaaggtgggtattatttcccaggtgctgttaccagactatgtggcgcttttcccggaactgaccaccagcatgcccgcgcatattgcggcgtccacgggcattgatgctctttgccacttactggagtgttttaccgcgaccgtggcaaatccggtcagcgataacgcggcgctgactgggttaagtaaacttttccggcacattcaacccgccgtgaacgatcctcaggatctgcgcgcaaaactggaaatgctgtgggcgtcttactatggcggcgtagcgataacccatgcgggcacgcatctcgttcatgcgctctcctacccgttaggtggcaaatatcatctgccgcatggcgtcgcgaatgccatcttgctggcgccgtgcatggcgtttgttcgcccctgggcggtcgagaaatttgcccgggtctgggattgcattcccgatgcggaaaccgccctgagcgcggaagaaaaatctcatgccctggtgacctggttacaggcattagtcaatcaactcaagctacccaacaatctcgcggctctcggcgtaccgccagaggatattgcctctctgagcgaggcggcactgaacgtgaagcgccttatgaacaatgtgccgtgccaaattgatctacaggacgtacaggccatttaccaaacactgtttccgcaacatccatttaaggag

SEQ ID NO: 334 - protein, 385 aa, Escherichia coli
VVIINSTILSGAGAIPSLTSLLPDIRKMLLVTDRNIAQLDGVQQIRALLEKHCPQVNVIDNVPAEPTHHDVRQLMDAPGDASFDVVVGIGGGSVLDVAKLLSVLCHPQSPGLDALLAGEKPTQRVQSWLIPTTAGTGSEATPNAILAIPEQSTKVGIISQVLLPDYVALFPELTTSMPAHIAASTGIDALCHLLECFTATVANPVSDNAALTGLSKLFRHIQPAVNDPQDLRAKLEMLWASYYGGVAITHAGTHLVHALSYPLGGKYHLPHGVANAILLAPCMAFVRPWAVEKFARVWDCIPDAETALSAEEKSHALVTWLQALVNQLKLPNNLAALGVPPEDIASLSEAALNVKRLMNNVPCQIDLQDVQAIYQTLFPQHPFKE

SEQ ID NO: 335 - DNA, 885 bp, Escherichia coli
atgccgaaaaccattgaaggtgtattaaccgccattgtcaccccgtttaccgcgaccggcagtctgaatatcccggcgttaaaagtgcaggtgaatcgtcaactggaagcgggtaacgcgattttttgcggcggcaccaacggcgagttttttgtgttgaatgaacaggagaagctcagcgttacgcaaacctgcgtggatgaagtggctggtcgtgcgccggtcgtggcacacattggcgagatctctacgcgcgaaacgattcgtctgggtcagcagattgaaaaacttggcgtagatgccgtgtcggtcattgccccttacttcgtaccgctgaaacaggaagagttgattgcgcattacagcgcaattgccgacgcactgagcattccgatgtttctctataacatcccggcccgcactggcaatacgatccagccagaaaccgcgcgtgctctggcgtcgcaccccaatatcattgggattaaagacagcgccggaagcgacgaaagcctgaagggttttctcgatgcggtgcgcgacattgacggctttaatgtgctcaacggcccggattcgctgatccataaagggtttgtcgagggatgttcaacctgtatctctgggctcgccaacatcgcgccgcgagaaatcaatgccatctggtctcgcttccatgccggtgatattgaagggtcttatgaagcacaggagagtgtaacgggcctgcgtaccgatctttataaagtagcattctccccggctgcggtgaaaaaagcgttgcagcttatggggcatgatgttggtgatagccgctacgcggttaatttcacgcctgaacagatcagcgagattcaacaaattattcgtcattataacattaat

SEQ ID NO: 336 - protein, 295 aa, Escherichia coli
MPKTIEGVLTAIVTPFTATGSLNIPALKVQVNRQLEAGNAIFCGGTNGEFFVLNEQEKLSVTQTCVDEVAGRAPVVAHIGEISTRETIRLGQQIEKLGVDAVSVIAPYFVPLKQEELIAHYSAIADALSIPMFLYNIPARTGNTIQPETARALASHPNIIGIKDSAGSDESLKGFLDAVRDIDGFNVLNGPDSLIHKGFVEGCSTCISGLANIAPREINAIWSRFHAGDIEGSYEAQESVTGLRTDLYKVAFSPAAVKKALQLMGHDVGDSRYAVNFTPEQISEIQQIIRHYNIN

SEQ ID NO: 337 - DNA, 756 bp, Escherichia coli
atgtttttgtggtttatgcagccagatatctggctcactttaattaccctcacctttctggaaattattcttggggtggataatattatttttctttcactggtggtggcaaaacttccgttatcacaacaaaatatggcgcgtaaactgggtttaagctgcgcgatgattatgcggatattattgctgatatccattgcgtggctttcacatattacccagccgctttttaccgtgctgacgctggagatttcgttccgcaccttgattctgctcgggggcgggctgttcctgatttataaagcgatacaggagatacgcgaagagctgtcgcccgcgcaggaagacgaacatggcagcggatcgcggcaactgtcgttgtgcggtgccattgtacagataatgctgctcgatatcgtgtttagcctggattcggtgatcaccgccgtcggcctttctcagcatatatttatcatgattgccgccgtaatgattgccgtcggtgtcatgatgtttgcggcgaaaacaattggtgatttcgttaacgccacgccgtcaataaaaatactggcgttaacctttttattgtttgtcggtgtattgctggttgccgatagtctcaacattcatattgccaaagagtatctctacttcgcgatatttttctcattaagtgttgagacactcaatattatccgtgaaagaaaaaataaaaaagtttcgacattgctcgaaacgcatgaatcgcactcgcat

SEQ ID NO: 338 - protein, 252 aa, Escherichia coli
MFLWFMQPDIWLTLITLTFLEIILGVDNIIFLSLVVAKLPLSQQNMARKLGLSCAMIMRILLLISIAWLSHITQPLFTVLTLEISFRTLILLGGGLFLIYKAIQEIREELSPAQEDEHGSGSRQLSLCGAIVQIMLLDIVFSLDSVITAVGLSQHIFIMIAAVMIAVGVMMFAAKTIGDFVNATPSIKILALTFLLFVGVLLVADSLNIHIAKEYLYFAIFFSLSVETLNIIRERKNKKVSTLLETHESHSH

SEQ ID NO: 339 - DNA, 1167 bp, Escherichia coli
atgtctgtagcccttattcgtgacggcgtcatccgtccatccgaaaacgattcgcatgtgcttaccgccatgctgccctcgtcctgcccgcaaaaccacgcggcgaatattctgcctttgccggatggcgcgttaatgtgcgtctggtttgcgggaacgcaggaaggtattgccgatatttctgtctggggatcgcgattgcccgctggcggaatgcagtggagcgatgcggtcaaactttcccacgatgacacgcgttcagagcaaaacccggtgctgtttctcgcgccggataacgtgctgtggctcctatggaccgcacaaatatccggtaatcaggacaccgccatcgtccgctaccgtaagtcagacgacctcggacaaacctggggcgagattgccaccctgcttgataaacccggtacgttcattcgacagccaatcacggtgcttgataacggcaactggctgctgcccgtcttttattgccgtacccaacccggcgaaaaatgggtcggcaatgatgatatcagcgcagtgaaaatttccgctgacggtggtcactcctggcgcgatgtcgaggtgccgcaaagtcttggctgtgttcatatgaatatcacaatgctgcacaacggtacgttggttgctctctttcgcagccgttgggcagacaacatctatatcagccattccgcggacaacggcgagagctggtcagtaccgcaagcaaccgaattgcccaacaacaattcgtctattcaggtaacgacacttgccagcggcgaactggcgctggtgtacaacgcgatgagtgcggcaggcgcagtagaacgtcgcgcgtcgctttatgacgaaatcgacgatggcgacgacagccgcaaagaaccgacagccgtcggacgctccgctttctggggggccccacgcgcgccgatgacggtagcgatttctgccgatggtgggaaaagctggccgtggcggcgcaatctcgatgaaggcgacggctactgcatgaccaacaattccctggaaaagctaaatcgtgagttctcctaccccagcatcaaacaaagcccggacggtacgctacatatcgcttacacctggtggcgtcaggccatcaagtacgtacgcatctcccccgagtgggttaaggggcaggcatca

SEQ ID NO: 340 - protein, 389 aa, Escherichia coli
MSVALIRDGVIRPSENDSHVLTAMLPSSCPQNHAANILPLPDGALMCVWFAGTQEGIADISVWGSRLPAGGMQWSDAVKLSHDDTRSEQNPVLFLAPDNVLWLLWTAQISGNQDTAIVRYRKSDDLGQTWGEIATLLDKPGTFIRQPITVLDNGNWLLPVFYCRTQPGEKWVGNDDISAVKISADGGHSWRDVEVPQSLGCVHMNITMLHNGTLVALFRSRWADNIYISHSADNGESWSVPQATELPNNNSSIQVTTLASGELALVYNAMSAAGAVERRASLYDEIDDGDDSRKEPTAVGRSAFWGAPRAPMTVAISADGGKSWPWRRNLDEGDGYCMTNNSLEKLNREFSYPSIKQSPDGTLHIAYTWWRQAIKYVRISPEWVKGQAS

SEQ ID NO: 341 - DNA, 1530 bp, Escherichia coli
ctggttgtgagggcattaatgcgggaacgcggcccatcgctcgcgaaaacgatgaagaacgtaagcccgatctgtttatcgccccatcccctgaaaacagtgtcgccatcaccctacacgccggtgatttcgccgtctttatgcctgaggaacctcaccaggcgctgtgcgcaattggcacggctacttcaatacgcaaagcggtctttaaagtaccgcgcgacatgctggaagcctaaaaggagagaaaaaatgacaatggaaatgatcctggcattaggaatactggtcctgatgatcgtgctgatcatgtcggacaaaatgccttttggcgcaccgccactgcttgcgtgtttattgctggttgtatcgggactttcgaccgttcaacaggcttttgccggattcgtcaatccaagcgtggtgatgattgcagggtttatggtggtcatggcggcgctacaaaaaacccggcttatcagcaacgttaaatctgcgatgataagcctggtcaataaaggcagttaccgcagctatgggctgttgttagtcattgttatgctgggtgccagtcttgccggcaccggagcgaccggttattacgtgctaattctgtcgctggtatccaccattccgtacagtaaaaagctaccaacatcgaaattaatgatgcccctgggatttgccaccaaccacccgcttcttcctatcaatctcgcgcttctctttggcgttacggcgaccgtactcgaaaccgcggggtttcatcaggagatttcgatggggcgctttgcgctggtgaatctcatcatgtcagcggctttcctcgcatggagtcttattgcctaccgttttcttccggatcatcccattgcggatgcttccgaggatgcgctggcggcacgcgaggaaacgtttaacgcccttcctgcctggaaagaatattgcactattgccgcattcgctgtcagcgttatcggcatgatgctaatgaacattctgggaaatatcgccttcgttattccgggtcttgcgggtgcgtttgttctgatgatcgatgtactggacttcaaagaagttcgcgatcatatgggggctccggtcattttaatgatggcgggggtgatcggtgtagctgatgcactggcgggcaccggctttacggcgatggttggcgatgccgttgcaggtgtgctcggttctggcgtctcaccgtttgtatttattgtcgcctttgctttgcttaccagtacctgcgccaccttcacgggttcgaatatggggtcagtatatatttttgcccccatcgccattgccgcctgtactagccttgggcttaacccgaccgctgccgcgattgcggtggtgatttctggctggaatggcggctatatgcctattgacggaatgccagccatgatcctcggaatggggaaatacaaacttcccgaattctgggtgttctctgtaccaatgtatctcatccgcattctggcgctttgtgcaggcgctgtttttatcttcccaatg

SEQ ID NO: 342 - protein, 510 aa, Escherichia coli
LVVRALMRERGPSLAKTMKNVSPICLSPHPLKTVSPSPYTPVISPSLCLRNLTRRCAQLARLLQYAKRSLKYRATCWKPKRREKMTMEMILALGILVLMIVLIMSDKMPFGAPPLLACLLLVVSGLSTVQQAFAGFVNPSVVMIAGFMVVMAALQKTRLISNVKSAMISLVNKGSYRSYGLLLVIVMLGASLAGTGATGYYVLILSLVSTIPYSKKLPTSKLMMPLGFATNHPLLPINLALLFGVTATVLETAGFHQEISMGRFALVNLIMSAAFLAWSLIAYRFLPDHPIADASEDALAAREETFNALPAWKEYCTIAAFAVSVIGMMLMNILGNIAFVIPGLAGAFVLMIDVLDFKEVRDHMGAPVILMMAGVIGVADALAGTGFTAMVGDAVAGVLGSGVSPFVFIVAFALLTSTCATFTGSNMGSVYIFAPIAIAACTSLGLNPTAAAIAVVISGWNGGYMPIDGMPAMILGMGKYKLPEFWVFSVPMYLIRILALCAGAVFIFPM

SEQ ID NO: 343 - DNA, 666 bp, Escherichia coli
agcaagattattatgggggatgtactgaatcatgcagcactgaagcaggccatgcagggacaggatgttgtgtatgccaaccttacgggggaagatttagatattcaggcaaattcagtgatcgctgcgatgaaagcctgtgatgttaaacgtctgatctttgttctttccctcggtatttataatgaagttccaggaaaatttggcgaatggaataatgcagttattggtgaacccctaaaaccattccgcagggctgcggatgcaattgaggcttctggactggaatatacaattcttcgccctgcctggctgactgatgaagatattattgattatgagcttacctcacgcaatgaaccattcaaaggtacgatcgtatcacgtaagagtgtcgcagcattaatcacagatatcatcaataaacctgagaaacacattggtgagaatataggcatcaatcaacccgggactgatggtgataagcccttcttcatgtaaatcaattatatagctaccatcgtactgtactatgtgcagtacgatttattaaacttattaaggtgaactgatcaatcagatgcgattaacatgtgtagaaccagtaagaataaaatacgccatgtatataacattacgacaattctaatatctgcacatcaatga

SEQ ID NO: 344 - DNA, 486 bp, Escherichia coli
atgggggatgtactgaatcatgcagcactgaagcaggccatgcagggacaggatgttgtgtatgccaaccttacgggggaagatttagatattcaggcaaattcagtgatcgctgcgatgaaagcctgtgatgttaaacgtctgatctttgttctttccctcggtatttataatgaagttccaggaaaatttggcgaatggaataatgcagttattggtgaacccctaaaaccattccgcagggctgcggatgcaattgaggcttctggactggaatatacaattcttcgccctgcctggctgactgatgaagatattattgattatgagcttacctcacgcaatgaaccattcaaaggtacgatcgtatcacgtaagagtgtcgcagcattaatcacagatatcatcaataaacctgagaaacacattggtgagaatataggcatcaatcaacccgggactgatggtgataagcccttcttcatg

SEQ ID NO: 345 - protein, 162 aa, Escherichia coli
MGDVLNHAALKQAMQGQDVVYANLTGEDLDIQANSVIAAMKACDVKRLIFVLSLGIYNEVPGKFGEWNNAVIGEPLKPFRRAADAIEASGLEYTILRPAWLTDEDIIDYELTSRNEPFKGTIVSRKSVAALITDIINKPEKHIGENIGINQPGTDGDKPFFM

SEQ ID NO: 346 - DNA, 4046 bp, Escherichia coli
gaataatatttcaatacatcaatttatttaacttaaatatatccagggattcacaaaaaaaggtgttttcctctatcaaaagtgaatggctaaaggaaattaattattaaaggttactgtaatactatagagagacaaagaaatacgttcagcagctaatgctaagttcatcatgaaaaatgcctataaatcaaagggtgatgtttaaaacagacacattttctgaaacacgatatccctccgcccgttcgcaaaagtaatctgcgatcttcatcacgcttcgatagtcatctttaaatatactggcctggtcattcttaataaaaatgaattgtctggtgtattaattcctatggaatcataaaaacaatgaatggagaacatattatatgtctgccaaaagacgacttcttattgcgtgtaccttgataacagctatctatcattttcctgcatattcttcattagaatataaaggaacctttggttcaataaatgcgggttatgcagactggaacagtggatttgtaaacactcaccgtggtgaagtatggaaagtgactgcggattttggggtaaattttaaagaagcagaattttactcattttatgaaagtaatgtactcaatcatgctgtagcagggagaaatcatacggtttcagcaatgacgcatgtcagactctttgactctgatatgacattctttggcaaaatttatggccaatgggataactcatggggtgacgatctggacatgttttatggattcggttacctcggctggaacggcgagtggggcttttttaaaccgtatattggattgcataatcaatctggtgactacgtatcagctaaatatggtcaaacgaatggttggaatggttatgttgttggctggacagcagtattaccatttacgttatttgacgaaaaatttgttttatctaactggaatgaaatagaactggacaggaacgatgcttacacggagcagcaatttggccggaacgggttaaatggcggtttaactattgcctggaagttctatcctcgctggaaagcaagtgtgacgtggcgttatttcgataataagctgggctacgatggctttggcgatcaaatgatttatatgcttggttatgatttctaatttttatcagggaataattatgcagaaaacgttaatggccagtttgatcggccttgcagtttgcacagggaatgcttttagtcctgccttagccgcagaggctaaacaacctaatttagtcattattatggcggatgatttaggttatggcgatttagcaacatatggtcatcagatcgttaaaacacctaatatcgacaggcttgcccaggaaggggtcaaatttactgactactatgcccccgctcctttaagttcaccttcacgcgcagggctattaaccggccggatgccatttcgtactggaattcgctcatggattccttcaggcaaagatgttgccttagggcgtaacgaactcacgattgctaatctactcaaagcgcaagggtacgacacggcaatgatgggtaagctgcatctgaatgcaggcggcgatcgcaccgatcagccacaagcacaagatatgggctttgattactcactggctaatacggcgggctttgttaccgacgccacgctggataacgctaaagaacgcccgcgttatggcatggtttacccgacaggctggctacgtaatgggcaacccactccacgagccgataaaatgagcggtgagtatgtcagttcggaagtcgtcaactggctggataacaaaaaggacagcaagcctttcttcctctatgttgcttttaccgaagtgcatagccccctggcttcgcccaaaaaatacctcgacatgtactcacaatatatgagcgcgtatcagaagcagcatcctgatttattttatggcgactgggcagacaaaccctggcgtggtgtgggggaatattatgccaatatcagctatctggatgcacaggttggaaaagtgctggataaaatcaaagcgatgggtgaagaagataacacaatcgttatttttaccagtgataacggtccggtaacgcgtgaagcgcgcaaagtgtatgagctgaatttggcaggggaaacggatggattacgcggtcgcaaggataacctttgggaaggcggaattcgtgttccagccattattaaatatggtaaacatctaccacagggaatggtttcagatacacccgtttatggtctggactggatgcctactttagcgaaaatgatgaacttcaaattacctacagaccgtactttcgatggtgaatcgctggttcctgttcttgagcaaaaagcattgaaacgcgaaaagccattaattttcgggattgatatgccattccaggatgatccaaccgatgaatgggcgatccgtgatggtgactggaagatgattatcgatcgcaataataaaccgaaatatctctacaatctgaaatctgatcgttatgaaacacttaatctgatcggtaaaaaaccagatattgaaaaacagatgtatggtaagtttttaaaatataaaactgatattgataatgattctctaatgaaagccagaggtgataaaccagaagcggtgacctggggctaacctgataatcataataaatgtaatgtatgccatttagggctatgcccgcctgattcagtgctacgcattgaatcaggttcttttcgcgttgaacaatatcaagatacggctattcgcagggagtggatatgtttaccaacgtaaatgttgattgttgcaaaacaccaggatgtaaaaacttggggttgctgaatagccaggattatgtcgcacagggtaaaaatattttatgccgtgaatgtggttacttgtttccagtgatatctgaacagtcgcttaatatttatcgtaatattgtgaatcactcctggagaggtttgatttgccaatgttcaacttgcggaggcacgtccctcaaaaaatatggatattctgcacaaggccagagaagaatgtattgccatcattgtgagaaaacatttatcactctggaacacgtaattaccacaccacgaggagcccagttagcattgatgattgagcaaggggaggcacttgcggatatcagaaagtcattacttcttaacagcactggacttagccgtgaactgttaaaattagcgcgtgaagcaaactataaagaaagtcgacagtgtttcccagcttctgatattaccctgagtacccgcgcttttcgcgtcaagtataatggtagcaataactctctttatgctcttgttaccgcagaagaacaaagcggcagggtggttgctatctcaaccaattactccccatctgccgtagagcaacattatcaatacacatcgaactatgaagagcgtatgtctccagggacgctggcacatcatgtccagcgcaaagagttacttactatgcggcgggataccttgtttgatattgattacggcccggcagttttacatcaaaacgatccgggaatgttggtaaaaccggttcttccggcatatcgtcattttgaactggtcagaatactgaccgatgagcattccaacaacgttcagcattaccttgatcacgaatgctttatattgggcggctgcctgatggctaatttgcagcatattcatcaaggtcgctgccatatttcctttgtcaaagagcgcggtgtggcacccgccaccattgattttccaccgcgattattccttagtggtggggtacgaaataatgtctggcgtgcattttctaaccgcaattattcaatggctgtatgcaatctcactggcagtaagaaagtccgcgagatgcggcatgcaacattgaacagtgcgacgcgttttatccactttgtggagaaccatcctttccttatatcattgaaccgaatgtctcctgcgaatgtcgtttctacattagatatcctcaaacatctgtggaataaaaaactagagcatggaaca

SEQ ID NO: 347 - DNA, 759 bp, Escherichia coli
atgtctgccaaaagacgacttcttattgcgtgtaccttgataacagctatctatcattttcctgcatattcttcattagaatataaaggaacctttggttcaataaatgcgggttatgcagactggaacagtggatttgtaaacactcaccgtggtgaagtatggaaagtgactgcggattttggggtaaattttaaagaagcagaattttactcattttatgaaagtaatgtactcaatcatgctgtagcagggagaaatcatacggtttcagcaatgacgcatgtcagactctttgactctgatatgacattctttggcaaaatttatggccaatgggataactcatggggtgacgatctggacatgttttatggattcggttacctcggctggaacggcgagtggggcttttttaaaccgtatattggattgcataatcaatctggtgactacgtatcagctaaatatggtcaaacgaatggttggaatggttatgttgttggctggacagcagtattaccatttacgttatttgacgaaaaatttgttttatctaactggaatgaaatagaactggacaggaacgatgcttacacggagcagcaatttggccggaacgggttaaatggcggtttaactattgcctggaagttctatcctcgctggaaagcaagtgtgacgtggcgttatttcgataataagctgggctacgatggctttggcgatcaaatgatttatatgcttggttatgatttc

SEQ ID NO: 348 - protein, 253 aa, Escherichia coli
MSAKRRLLIACTLITAIYHFPAYSSLEYKGTFGSINAGYADWNSGFVNTHRGEVWKVTADFGVNFKEAEFYSFYESNVLNHAVAGRNHTVSAMTHVRLFDSDMTFFGKIYGQWDNSWGDDLDMFYGFGYLGWNGEWGFFKPYIGLHNQSGDYVSAKYGQTNGWNGYVVGWTAVLPFTLFDEKFVLSNWNEIELDRNDAYTEQQFGRNGLNGGLTIAWKFYPRWKASVTWRYFDNKLGYDGFGDQMIYMLGYDF

SEQ ID NO: 349 - DNA, 1476 bp, Escherichia coli
atggccagtttgatcggccttgcagtttgcacagggaatgcttttagtcctgccttagccgcagaggctaaacaacctaatttagtcattattatggcggatgatttaggttatggcgatttagcaacatatggtcatcagatcgttaaaacacctaatatcgacaggcttgcccaggaaggggtcaaatttactgactactatgcccccgctcctttaagttcaccttcacgcgcagggctattaaccggccggatgccatttcgtactggaattcgctcatggattccttcaggcaaagatgttgccttagggcgtaacgaactcacgattgctaatctactcaaagcgcaagggtacgacacggcaatgatgggtaagctgcatctgaatgcaggcggcgatcgcaccgatcagccacaagcacaagatatgggctttgattactcactggctaatacggcgggctttgttaccgacgccacgctggataacgctaaagaacgcccgcgttatggcatggtttacccgacaggctggctacgtaatgggcaacccactccacgagccgataaaatgagcggtgagtatgtcagttcggaagtcgtcaactggctggataacaaaaaggacagcaagcctttcttcctctatgttgcttttaccgaagtgcatagccccctggcttcgcccaaaaaatacctcgacatgtactcacaatatatgagcgcgtatcagaagcagcatcctgatttattttatggcgactgggcagacaaaccctggcgtggtgtgggggaatattatgccaatatcagctatctggatgcacaggttggaaaagtgctggataaaatcaaagcgatgggtgaagaagataacacaatcgttatttttaccagtgataacggtccggtaacgcgtgaagcgcgcaaagtgtatgagctgaatttggcaggggaaacggatggattacgcggtcgcaaggataacctttgggaaggcggaattcgtgttccagccattattaaatatggtaaacatctaccacagggaatggtttcagatacacccgtttatggtctggactggatgcctactttagcgaaaatgatgaacttcaaattacctacagaccgtactttcgatggtgaatcgctggttcctgttcttgagcaaaaagcattgaaacgcgaaaagccattaattttcgggattgatatgccattccaggatgatccaaccgatgaatgggcgatccgtgatggtgactggaagatgattatcgatcgcaataataaaccgaaatatctctacaatctgaaatctgatcgttatgaaacacttaatctgatcggtaaaaaaccagatattgaaaaacagatgtatggtaagtttttaaaatataaaactgatattgataatgattctctaatgaaagccagaggtgataaaccagaagcggtgacctggggc

SEQ ID NO: 350 - protein, 492 aa, Escherichia coli
MASLIGLAVCTGNAFSPALAAEAKQPNLVIIMADDLGYGDLATYGHQIVKTPNIDRLAQEGVKFTDYYAPAPLSSPSRAGLLTGRMPFRTGIRSWIPSGKDVALGRNELTIANLLKAQGYDTAMMGKLHLNAGGDRTDQPQAQDMGFDYSLANTAGFVTDATLDNAKERPRYGMVYPTGWLRNGQPTPRADKMSGEYVSSEVVNWLDNKKDSKPFFLYVAFTEVHSPLASPKKYLDMYSQYMSAYQKQHPDLFYGDWADKPWRGVGEYYANISYLDAQVGKVLDKIKAMGEEDNTIVIFTSDNGPVTREARKVYELNLAGETDGLRGRKDNLWEGGIRVPAIIKYGKHLPQGMVSDTPVYGLDWMPTLAKMMNFKLPTDRTFDGESLVPVLEQKALKREKPLIFGIDMPFQDDPTDEWAIRDGDWKMIIDRNNKPKYLYNLKSDRYETLNLIGKKPDIEKQMYGKFLKYKTDIDNDSLMKARGDKPEAVTWG

SEQ ID NO: 351 - DNA, 1260 bp, Escherichia coli
gtggatatgtttaccaacgtaaatgttgattgttgcaaaacaccaggatgtaaaaacttggggttgctgaatagccaggattatgtcgcacagggtaaaaatattttatgccgtgaatgtggttacttgtttccagtgatatctgaacagtcgcttaatatttatcgtaatattgtgaatcactcctggagaggtttgatttgccaatgttcaacttgcggaggcacgtccctcaaaaaatatggatattctgcacaaggccagagaagaatgtattgccatcattgtgagaaaacatttatcactctggaacacgtaattaccacaccacgaggagcccagttagcattgatgattgagcaaggggaggcacttgcggatatcagaaagtcattacttcttaacagcactggacttagccgtgaactgttaaaattagcgcgtgaagcaaactataaagaaagtcgacagtgtttcccagcttctgatattaccctgagtacccgcgcttttcgcgtcaagtataatggtagcaataactctctttatgctcttgttaccgcagaagaacaaagcggcagggtggttgctatctcaaccaattactccccatctgccgtagagcaacattatcaatacacatcgaactatgaagagcgtatgtctccagggacgctggcacatcatgtccagcgcaaagagttacttactatgcggcgggataccttgtttgatattgattacggcccggcagttttacatcaaaacgatccgggaatgttggtaaaaccggttcttccggcatatcgtcattttgaactggtcagaatactgaccgatgagcattccaacaacgttcagcattaccttgatcacgaatgctttatattgggcggctgcctgatggctaatttgcagcatattcatcaaggtcgctgccatatttcctttgtcaaagagcgcggtgtggcacccgccaccattgattttccaccgcgattattccttagtggtggggtacgaaataatgtctggcgtgcattttctaaccgcaattattcaatggctgtatgcaatctcactggcagtaagaaagtccgcgagatgcggcatgcaacattgaacagtgcgacgcgttttatccactttgtggagaaccatcctttccttatatcattgaaccgaatgtctcctgcgaatgtcgtttctacattagatatcctcaaacatctgtggaataaaaaactagagcatggaaca

SEQ ID NO: 352 - protein, 420 aa, Escherichia coli
VDMFTNVNVDCCKTPGCKNLGLLNSQDYVAQGKNILCRECGYLFPVISEQSLNIYRNIVNHSWRGLICQCSTCGGTSLKKYGYSAQGQRRMYCHHCEKTFITLEHVITTPRGAQLALMIEQGEALADIRKSLLLNSTGLSRELLKLAREANYKESRQCFPASDITLSTRAFRVKYNGSNNSLYALVTAEEQSGRVVAISTNYSPSAVEQHYQYTSNYEERMSPGTLAHHVQRKELLTMRRDTLFDIDYGPAVLHQNDPGMLVKPVLPAYRHFELVRILTDEHSNNVQHYLDHECFILGGCLMANLQHIHQGRCHISFVKERGVAPATIDFPPRLFLSGGVRNNVWRAFSNRNYSMAVCNLTGSKKVREMRHATLNSATRFIHFVENHPFLISLNRMSPANVVSTLDILKHLWNKKLEHGT

SEQ ID NO: 353 - DNA, 5313 bp, Escherichia coli
cgtaatgatgccggatgagtatttcatccggcgtttttattattaaaccaggaacagtgaaatcgccgggatatatgtcaccagcattagcattaacagtagagccgccagtaggggcagggattgtttaaagaaatttcccaccgaaacttgcgtgatattacataccagcagcatcacggtacctaccggtggcgtgaatgcgccaatcgacaggttgaagatcatgatgatgccaaaatgcaccggatcgatgccaaagtgttcgaccaccggttttaatagtggtaccaggatcagcaaaatggcgtttccttccagaaacatccccagcgtcagcagcaatatgttgataatcaacaggaacatgtatttgttttcggtcagcgaagtcacaaaattcgccactgcgacaccagcatgttccattgagaaaatccatcccaatgcggcgctggccatgattaccagcatcaccgatgcggttgcgcgtgccgtttcgcccaatgctttgacgacatgagaaatccgcatttcacgatagataaaaaagccaatcgccagcacgattagcaccgctactgcacctgcttctgttggggtgaaaatgttagcgcgaataccacccaccacagcaaaaatgaggaacagcgcaggccaggcctgtcccagcgagaacaccacctctttgcccgtaggccagctttcacgcgagggtttagcgttagttttgcgggcgacaaggtagacggtaaacatcagtacgactgcgcatagcaaaccaggtaccagtccggcgataaacatttttccgatagagacgtcggcaaccagaccgtaaataatcagggctattccaggcggtatgatcggggtgactaacgagccaccagcggtaatggcggcggcaaacgcgcgattgtagcctttacgctccatctccggcaccatcatgcgcgacagcatcgccgcgtcagcaaggttagaggcgctgacgccgcccatcatggtgctgacgagaatgtttgccacgcccagtccgccgcgcattttccccaccagaacgttggcaatgtgcaggatgcgttcggcaatgccggtgtagctcattagtgtgccgagcaagataaaaaacggaattgccagcaatgatgggctttgcgttggcgcgattagtctttgcacggcaatttcaatcggtacgctggagaagaataaaaagtaagcgatgatgccaataaacatcgccagatagacccgaatgttgagaaacaaacagacgatcattagcggaataatcaataaccaactcattgcattttgtctccgctatcggattgttttgtatcgtttattaaccagtagagggtataaatagccgttgccagtgcgccgacagggaccgccagatcgatccagaaccatgaaaccttcagaatttgtgtcactttaaactgcgccatttcggctagtcggtagcccagccaggccatataaagcagcagtgcgatggagagaagggcgaccagtactgcaataacacgcctgagtttgcctggaagcatctccatcaggaagggaatggtcaggtgcgccctgtcacgttccgccaccactccacctaacatcaccacccaaatcatcagcattcccgacatttcttctgtccattgaagcggttggccgatgaaataacgcataaataccgctccaattgtcaccacaaccagaacgaatagcgcaaaggcagcactaaattctgccactttgccaaaaagacgcatgaaacctcctgttagtgcgtgtcctgcctaagagagatgaggcaggacgctgagcattaatgcttattgcagttgctgttgaatggtttcgtacagacctggtgtccattccgggaattgagagtaaacttcgcgtgctttcttctggaatggtccagtatcgggatagatcacttcgacgccggctgcctgcatggttttcaacatttcggcatcacgctcaagagtgagtttctggctatagacacccgcttcatagccggtctggtggatcatctccagttgttctggtgaaagggtgccaaagaaggcttcaccacctatccacactgaggtatttgtcaggtagttaaccattgtcagatatcttgcctgctcatacagtttttgcccttgcagcactgaaattgggttttctacgccgtcaataacgccctgggttaatgcgggataaacttcgcctaatggcatgggagttggtgttgcccccatcgcctgaatggcttttatttgcatgacgttattaggaacgcgaatttttaaacctgcgagatcgtcaacggtgcgaatgggttttttcgaaataatctgtcgagtgccatagagataattattcattaccacatgaattccctttttcttcagactttcatttttttgtttaaaccagtcgctttcatatattttgaacagtttttgcggatcgtcagtcagatacggtccaaacaaaatccccaaatcgggttcataatcggcaagaaaagccacatcactcaaggttatgacattcatgcccatcatggcttgctcggtgacatcctgttttgatcccaattgggagctgggatagagcgcaagtgttatttcagccattactttttttgttaataggtctgcccagtaacggcatgaccacatccaggggttccccagggttattttcataggcaacttttattgaaataggttttgcctggattattgacggtaaaaaaagggtactgacagtaattagcatcgctattattttgctcatctttacttactccatgctaaggaaataaaactccaacattgttgtcgggagtgaaaccttatgaaaaagcagtcattactgaaaagtagtcagcgaatagcagaatggctgcagatgtatcataaattcgtgcaccgggtaatactttgctgcttttaatcggtttttaatgcattttttgattgtatatcttaaagttatgtaatgcatgacgttacaaggaacaccctctgatgagtttagttaccgctgataagatctcttattctgttgatgatttattaaaaataaaatcattaatttggctgcggccattttaaattgtcaatacagataaaaactaagtgttgacgcagaatggtggtatccattaaatttatttagtgctgatttaatacatttgctgaacgtataattcatgctgatattaaaagaaagccgtcattcactaaataacttgttcggcaaggaaatcagagagtaacggatgattcgttacaacggggaaaggcagtaaatattcacatggtgaatttgttatcaacttgaaaacttattttactgggttccttctgatcatgtgagtgaacgcagtgattaatgattaacgttaagtgctaaccagagcgctttttatgaagttaaattaataatatccattatttatgaatgaggaagcctgtttattatatggaaatacttttaacaattttaattcttacgttggtagtatcattaaccagcgtgcttacacgtctgtctcctgtccagataccacttcctttaatccagattgccgctggtgcagtactggcccagcctatatttggtctgcatgtggaattcaatcctgaactttttctcttattgtttataccacccctgttgtttgctgaaagttcaaaaatacaacctaaagaattgatcaagcacagccgggaaattatcagcctggcacttgtgttggtactaatcactatttttggtgtcggctatgtgattcatttactcttaccgaatgtgccgctcatcgctgctttcgcattagccgccgtgttgtcgcctaccgatgccgtggcgttgctggggattgtcgggaaagggcgtatcagcaaaaacatccaggaagtgctcgaaggcgaagcgttgatgaatgatgcttccggcctggtggcgttgaaatttgctgttgcagtgacgatgggaacgatggaattcagcgttcatggcgcaaccattgcgttttttgtcgttgcgttgggcggtattgccgtggggatcgctgttacctggttatatggtaaagggctgctgttgatcagccgatatgctcacgatgaaccttccattcagattgtattgatgcttctgttgccgtttattgtttatctggttgcggaacattttggcttatctggcattcttgccgctgtcgccgcggggttaacaaccagtcgcattggcgtagtccaccacgcgcctattcgcctgagaattaaagctaaaagtagctggtcgatgcttgaatatgtctttaacggcatggtgtttctgattttaggcttacaactgccgggcattatttcggaatcactgatccgtgcagaaaacgatccactggtggacaccggatcgctgctccttgatgtcatttggatctacctggcgttaatggttgtgcgcctgggctggctttggctgatgcgtctgtatagccgtaaacgacccggcaaacatccgatgctgtttgctggatataaaacgcgtcatatgctgctggcgacctttgcgggggtgcgcggagctatcacgcttgcgggggtgctttctatcccgttattgctgccggatggcacaccttttcccgggcgttacttgctggtatttctcgccacaggtgtgatcctcttttcgctggtttgcggcattattattctgccgttattactggggaaaaatgtggggattttcagcgataaccgacaaaaagaagaggaagctgccgatctgtttatggctaaaatggccatactgagtgtgcaaaagaccgagcaacgtttgctgcgcgccagaacagaaaacctcgataacgagttgattatggaaacgggggccagagttatcggttatatgcgacatagtgaagaggatatgtcgcctaatgataattccctgcatatgcagcgtgcgaagctggaaagaacatttaatctggcggcgttaaatgccaaacgcgcggctatttaccagatgcgcgcaaggcaagaagtcagtgatgaaacactggcaaaaatagtcagtgaattagatgtgctggaaacgttaatcatggatagccgataattttatcgctgtcagtaatagggagttaaatgatggctgagagtaatacttccagcatcgtttattccctatgtatttccttatgggcagaacaatcgcctggattaatactgcattaatacaacatagtgatataaaccaagaatcaat

SEQ ID NO: 354 - DNA, 1269 bp, Escherichia coli
atgagttggttattgattattccgctaatgatcgtctgtttgtttctcaacattcgggtctatctggcgatgtttattggcatcatcgcttactttttattcttctccagcgtaccgattgaaattgccgtgcaaagactaatcgcgccaacgcaaagcccatcattgctggcaattccgttttttatcttgctcggcacactaatgagctacaccggcattgccgaacgcatcctgcacattgccaacgttctggtggggaaaatgcgcggcggactgggcgtggcaaacattctcgtcagcaccatgatgggcggcgtcagcgcctctaaccttgctgacgcggcgatgctgtcgcgcatgatggtgccggagatggagcgtaaaggctacaatcgcgcgtttgccgccgccattaccgctggtggctcgttagtcaccccgatcataccgcctggaatagccctgattatttacggtctggttgccgacgtctctatcggaaaaatgtttatcgccggactggtacctggtttgctatgcgcagtcgtactgatgtttaccgtctaccttgtcgcccgcaaaactaacgctaaaccctcgcgtgaaagctggcctacgggcaaagaggtggtgttctcgctgggacaggcctggcctgcgctgttcctcatttttgctgtggtgggtggtattcgcgctaacattttcaccccaacagaagcaggtgcagtagcggtgctaatcgtgctggcgattggcttttttatctatcgtgaaatgcggatttctcatgtcgtcaaagcattgggcgaaacggcacgcgcaaccgcatcggtgatgctggtaatcatggccagcgccgcattgggatggattttctcaatggaacatgctggtgtcgcagtggcgaattttgtgacttcgctgaccgaaaacaaatacatgttcctgttgattatcaacatattgctgctgacgctggggatgtttctggaaggaaacgccattttgctgatcctggtaccactattaaaaccggtggtcgaacactttggcatcgatccggtgcattttggcatcatcatgatcttcaacctgtcgattggcgcattcacgccaccggtaggtaccgtgatgctgctggtatgtaatatcacgcaagtttcggtgggaaatttctttaaacaatccctgcccctactggcggctctactgttaatgctaatgctggtgacatatatcccggcgatttcactgttcctggtt

SEQ ID NO: 355 - protein, 423 aa, Escherichia coli
MSWLLIIPLMIVCLFLNIRVYLAMFIGIIAYFLFFSSVPIEIAVQRLIAPTQSPSLLAIPFFILLGTLMSYTGIAERILHIANVLVGKMRGGLGVANILVSTMMGGVSASNLADAAMLSRMMVPEMERKGYNRAFAAAITAGGSLVTPIIPPGIALIIYGLVADVSIGKMFIAGLVPGLLCAVVLMFTVYLVARKTNAKPSRESWPTGKEVVFSLGQAWPALFLIFAVVGGIRANIFTPTEAGAVAVLIVLAIGFFIYREMRISHVVKALGETARATASVMLVIMASAALGWIFSMEHAGVAVANFVTSLTENKYMFLLIINILLLTLGMFLEGNAILLILVPLLKPVVEHFGIDPVHFGIIMIFNLSIGAFTPPVGTVMLLVCNITQVSVGNFFKQSLPLLAALLLMLMLVTYIPAISLFLV

SEQ ID NO: 356 - DNA, 471 bp, Escherichia coli
atgcgtctttttggcaaagtggcagaatttagtgctgcctttgcgctattcgttctggttgtggtgacaattggagcggtatttatgcgttatttcatcggccaaccgcttcaatggacagaagaaatgtcgggaatgctgatgatttgggtggtgatgttaggtggagtggtggcggaacgtgacagggcgcacctgaccattcccttcctgatggagatgcttccaggcaaactcaggcgtgttattgcagtactggtcgcccttctctccatcgcactgctgctttatatggcctggctgggctaccgactagccgaaatggcgcagtttaaagtgacacaaattctgaaggtttcatggttctggatcgatctggcggtccctgtcggcgcactggcaacggctatttataccctctactggttaataaacgatacaaaacaatccgatagcggagacaaaatgcaa

SEQ ID NO: 357 - protein, 157 aa, Escherichia coli
MRLFGKVAEFSAAFALFVLVVVTIGAVFMRYFIGQPLQWTEEMSGMLMIWVVMLGGVVAERDRAHLTIPFLMEMLPGKLRRVIAVLVALLSIALLLYMAWLGYRLAEMAQFKVTQILKVSWFWIDLAVPVGALATAIYTLYWLINDTKQSDSGDKMQ

SEQ ID NO: 358 - DNA, 885 bp, Escherichia coli
ttgcctatgaaaataaccctggggaacccctggatgtggtcatgccgttactgggcagacctattaacaaaaaaagtaatggctgaaataacacttgcgctctatcccagctcccaattgggatcaaaacaggatgtcaccgagcaagccatgatgggcatgaatgtcataaccttgagtgatgtggcttttcttgccgattatgaacccgatttggggattttgtttggaccgtatctgactgacgatccgcaaaaactgttcaaaatatatgaaagcgactggtttaaacaaaaaaatgaaagtctgaagaaaaagggaattcatgtggtaatgaataattatctctatggcactcgacagattatttcgaaaaaacccattcgcaccgttgacgatctcgcaggtttaaaaattcgcgttcctaataacgtcatgcaaataaaagccattcaggcgatgggggcaacaccaactcccatgccattaggcgaagtttatcccgcattaacccagggcgttattgacggcgtagaaaacccaatttcagtgctgcaagggcaaaaactgtatgagcaggcaagatatctgacaatggttaactacctgacaaatacctcagtgtggataggtggtgaagccttctttggcaccctttcaccagaacaactggagatgatccaccagaccggctatgaagcgggtgtctatagccagaaactcactcttgagcgtgatgccgaaatgttgaaaaccatgcaggcagccggcgtcgaagtgatctatcccgatactggaccattccagaagaaagcacgcgaagtttactctcaattcccggaatggacaccaggtctgtacgaaaccattcaacagcaactgcaa

SEQ ID NO: 359 - protein, 295 aa, Escherichia coli
LPMKITLGNPWMWSCRYWADLLTKKVMAEITLALYPSSQLGSKQDVTEQAMMGMNVITLSDVAFLADYEPDLGILFGPYLTDDPQKLFKIYESDWFKQKNESLKKKGIHVVMNNYLYGTRQIISKKPIRTVDDLAGLKIRVPNNVMQIKAIQAMGATPTPMPLGEVYPALTQGVIDGVENPISVLQGQKLYEQARYLTMVNYLTNTSVWIGGEAFFGTLSPEQLEMIHQTGYEAGVYSQKLTLERDAEMLKTMQAAGVEVIYPDTGPFQKKAREVYSQFPEWTPGLYETIQQQLQ

SEQ ID NO: 360 - DNA, 1671 bp, Escherichia coli
atgaggaagcctgtttattatatggaaatacttttaacaattttaattcttacgttggtagtatcattaaccagcgtgcttacacgtctgtctcctgtccagataccacttcctttaatccagattgccgctggtgcagtactggcccagcctatatttggtctgcatgtggaattcaatcctgaactttttctcttattgtttataccacccctgttgtttgctgaaagttcaaaaatacaacctaaagaattgatcaagcacagccgggaaattatcagcctggcacttgtgttggtactaatcactatttttggtgtcggctatgtgattcatttactcttaccgaatgtgccgctcatcgctgctttcgcattagccgccgtgttgtcgcctaccgatgccgtggcgttgctggggattgtcgggaaagggcgtatcagcaaaaacatccaggaagtgctcgaaggcgaagcgttgatgaatgatgcttccggcctggtggcgttgaaatttgctgttgcagtgacgatgggaacgatggaattcagcgttcatggcgcaaccattgcgttttttgtcgttgcgttgggcggtattgccgtggggatcgctgttacctggttatatggtaaagggctgctgttgatcagccgatatgctcacgatgaaccttccattcagattgtattgatgcttctgttgccgtttattgtttatctggttgcggaacattttggcttatctggcattcttgccgctgtcgccgcggggttaacaaccagtcgcattggcgtagtccaccacgcgcctattcgcctgagaattaaagctaaaagtagctggtcgatgcttgaatatgtctttaacggcatggtgtttctgattttaggcttacaactgccgggcattatttcggaatcactgatccgtgcagaaaacgatccactggtggacaccggatcgctgctccttgatgtcatttggatctacctggcgttaatggttgtgcgcctgggctggctttggctgatgcgtctgtatagccgtaaacgacccggcaaacatccgatgctgtttgctggatataaaacgcgtcatatgctgctggcgacctttgcgggggtgcgcggagctatcacgcttgcgggggtgctttctatcccgttattgctgccggatggcacaccttttcccgggcgttacttgctggtatttctcgccacaggtgtgatcctcttttcgctggtttgcggcattattattctgccgttattactggggaaaaatgtggggattttcagcgataaccgacaaaaagaagaggaagctgccgatctgtttatggctaaaatggccatactgagtgtgcaaaagaccgagcaacgtttgctgcgcgccagaacagaaaacctcgataacgagttgattatggaaacgggggccagagttatcggttatatgcgacatagtgaagaggatatgtcgcctaatgataattccctgcatatgcagcgtgcgaagctggaaagaacatttaatctggcggcgttaaatgccaaacgcgcggctatttaccagatgcgcgcaaggcaagaagtcagtgatgaaacactggcaaaaatagtcagtgaattagatgtgctggaaacgttaatcatggatagccga

SEQ ID NO: 361 - protein, 557 aa, Escherichia coli
MRKPVYYMEILLTILILTLVVSLTSVLTRLSPVQIPLPLIQIAAGAVLAQPIFGLHVEFNPELFLLLFIPPLLFAESSKIQPKELIKHSREIISLALVLVLITIFGVGYVIHLLLPNVPLIAAFALAAVLSPTDAVALLGIVGKGRISKNIQEVLEGEALMNDASGLVALKFAVAVTMGTMEFSVHGATIAFFVVALGGIAVGIAVTWLYGKGLLLISRYAHDEPSIQIVLMLLLPFIVYLVAEHFGLSGILAAVAAGLTTSRIGVVHHAPIRLRIKAKSSWSMLEYVFNGMVFLILGLQLPGIISESLIRAENDPLVDTGSLLLDVIWIYLALMVVRLGWLWLMRLYSRKRPGKHPMLFAGYKTRHMLLATFAGVRGAITLAGVLSIPLLLPDGTPFPGRYLLVFLATGVILFSLVCGIIILPLLLGKNVGIFSDNRQKEEEAADLFMAKMAILSVQKTEQRLLRARTENLDNELIMETGARVIGYMRHSEEDMSPNDNSLHMQRAKLERTFNLAALNAKRAAIYQMRARQEVSDETLAKIVSELDVLETLIMDSR

SEQ ID NO: 362 - DNA, 8682 bp, Escherichia coli
tttgtgacgcgcggtgtttccatcgcgcttagcaaagaacgtaatcaacgccgggcctgttaatgctacccggcgtttttattgccgttaactaacggtagcctgcaatttccgctttcaacgcgctaatttcagcatcgccatcaacaattcccagctcaaagcagtatttctttgtttcccctggttcaataaagggcagacgcccctgcgctcgttctttatcacgaccgtcaagaaaactattactgacctccagtcccataacatattcacccgcgcctaaatttttccactggataaagttgggtagctgcatgatgtcgaatttctcgtaaattccccaccccagttcggcgttcaccagcgcaactttactcatcccctgactgtcgctattcaacgtgagatagtaaacctgctcgtcaaaaccgggctgtggggtacaaatctccagatgactggctaacccttccgccgcatgcggggttcgtggcgttacgcttttagccgacagcaaaatttctgcctgtggcgataataaaggccagccgtaattaaagtgataaagaatttgcagcggctggcgggtgaaaccatgattagtcaccttgtcttcaatgcgcagcacattttcgccataacggcagcgaatggtcctttccagcgtcagattttcaccgaacaatcgtgtttcccgtactttgccattgatgacaaattcaatgctgtcgtcggtccgttctgtgcgataccccacctcttctgctggagtcgcagccaaacgcccgtgtaaccccagcgtttctccttcatcctcacagggcgtgccaatgtagctaagtccgcaggtagtcagtaaccccgcgtaaaagctacgtaaaaacccgttgccctgagactcaaaaaaagcgggggcgacaacaccgttgggggtgataaaagagagcgcagtgtccttgtagctggcccatgcaatatccagcgcgcgatcttttaccaccgtaaatgccagtcccgcaccagtacggacatcaaacgcttctgtaccctttgctctgccactacgtaactcatagtgtttaattccggcaacctgcgagagatcgccaatccacgaccaaatttcgcttttcattgtgctgcttcccgaatggacatgtcatggcgctggatgaacgtttcgatttccataaggcgagacgttccctccattgggccacgtcgggttaccgccagtgcaccgcaggcattggcatattgtaatgcccgatgggcgtcaaaccctagctggcggcaggcaatccatgcgccaccaaaacagtctcccgcaccggtcgggtcaacttcttccaccggatagctctcaacatgaaactgctcattcgcggagtagtaactggctccttgattgccgcgcttcacaatcacctctttaacaccttcttcaagaaaaccagcgattgcacgctccggtgtcgagtgtggcgacaagagcaacacttcgccctcgctgggcatgtagatatctgttaactcaagaacaaagtggagggcatcacgcatttctggaatatcgagcatctctttacgaatattcgggtcgaaagaaataacgccaccatttgctttaacgatggttactgcttttttaactgcgtctaccatatggaatgaaaacagggatgaacccataatatgaaaatgggtacaatccttcagaatattttcatcaacatgctgtgccgataatttaccgcaagcagcattcttgatattaaaaataaaatcgcgatcgccagagttatgataagtaacaaaggcactaccggtggcttccagaggtaagactgaaatccccctgatgtccacaccgtcagcagccagacgatgtatattaatatcaccaaagccatcattccccacgcagctaatgatgccgcacggaacgccaagacgtgtcacctggtcgataaaaatagcgggcgcaccactgggataagggccgttccagatacctggttgatcaaatggctggccgattttactcgccataatttcaaccagaatttctccaattgtgaagaccttactcatatgattaattccttgaaatgattagctgcgttttcttttatttcttacgtcaaaataaacggctacaagaatgactaatcctttaaccaccatctggtaaaaataaggaacattcattaagttcatgccattattaataacgccgatggttaatgcgccgatcaccgtccccaccacggttccatagccgccattcaggctggtgcctcccagtacagccgcggcaatagcatccagttcgtagctcaacgcggaattcggttgcccggaatagaggcgtgaggcaaggatcatcccgctgatacctgccagcacggctgtaatcataaagactttaattttcaagcgggtgacatttatccctgaataaattgccgcttctttattaccaccagtgatataaatttttcgtccaaaggttgttttagtaagaatgaagtggtttatcagcaataagatgattaatatccatataggaataggtatatagagaaattctccattccccagcgccagaaaagcatcatctttaatcatgatgggcataccatcggtcactatataagcgataccacggaagatccccatagtagcaacggtgacaataaacgaagggatccccgctatagccgtcaagccaccatttatcatccccaaagccagtgctgcaataatggataatgggaccaataaaacaaatggaattccccatgaagccccaagcgcagcaaatgtgccaatcaatgcaatggttgaaccgaccgataaatcaatatcgccaagcaaaagcacataagtcattccataggcggtaattgcaattatcgaaacctgaagaataatattagtaatgttattggcggtaaaaaaactgtcattaataaaactgaacagaatgattaacaccaccattccactgaggataccaccatattgcctgaagacttttttaaaattatttgcaatgggaatttccgaaggtttcggactggcaagagttttctctgtcatttaacgtactcctgttgcagcggtcattacctgtgtctgcgttaaattttcacatgaataaatatcggcaatcgttttattacgcattaccaccagacgatcgctaagtgccatgacttctggcagttcagaggacaccagaataattgctgtccctgccgcagccagttgacgtatcacgttatagatttcaaattttgcgccgacatccactccgcgcgttggttcatcgagcaataaaatacgcggagttttctccagccacttcgataacacgattttctgttgattaccgccgctcagtgctcccactgcctgatgcacagaactcactttagtgttcattctggcaattgattgcagcgtcttcgcctcttcttgtcggtgattgatgagtcccatccgcgaagcgttatattgaaacgccacatggtgccgtgttcatattgatgtcgtgcatcagcactaacccttcttccttgcggttttcggtcacaaaagcaatgccatgatcaatagcctggggattagcgatcctgacttccttaccatcaatcaacacagtcccgtgatacgaaacgaggccaaatagcgccttcatcacatcggaacgcccggcccccaccaggccaaaaaatccgaggacttcccccggacgcacagcgaaactgacctctttaaaaagcgaaggatgggaaagattttttacttccagttttgcaggaacattttcatccggtttttccccaagacgtgctggccaaatatttttcatttcccgaccaaccatttgggcaatcaagtgctggatatcactgtttttcttttcatgcgtagcgatatactcaccgtcagcggatcaccgaaatatcatctgaaatccgcataatttcatccatgcgatgagagatataaataaccgcacagcctcgctgctttaatttttcaataatgttaaacaggatctccgcttcattatcacttagcgaagatgtcggttcatccataatcacgacatccgctgcatagcttaaggctttagcaatttctaccagttgcctatgtgccatcgacatattgccgaccatttccagagggtctagtgggatgcccagttccgcgaggaggttctggcaatctgcgagcatttctttatcgttaattataccaaaacgtcgcggttcattattggcataaatattttccgccacggtcatattattactcaggctcagttcctgaaaaataatcgcaatccctaactggcgagaatgctgcggattattaatggtgatggtttcaccacgtagtgttatcgttccctgggttggcggataaacaccggccagtattttcattaatgtcgatttaccggcaccattctcgcctaataaagtatgcacccgccctttacgtaaagagagtgtaatatcttttaatgcctgaacatgaccaaatgtcttcgcaatatgcgaaacatcaagaataacatccgtcataatgacctcggtgtcacaacaaaacgccaataacgttttgttgtgaggtgaagatatttactatttacctgtataaacgccgggttgtaccgggatcattttttctaccggtttaccattgaggtgatcaacagcggcatcaatggctttagcacccatttgatcgggatattgccgaatcacggccgcaaacgttttttcactgtcaacggcatcacgcgcttctttcatgccgtcaaaaccaatgattttgatgttgtcgttatgcgcagattttgctgcgataaccgctgccagcgccgcatcatcaccaaagccaaacagaccattcaggttagcatttgcctgcataatgttttgcgcagtcgttaacgcttcagcccgcgtaataccaggctgttcagcaacaattttaatatccggtgtatcgcttaaccctttcttaaaaccatcaacgcgcgcaaccaccgattgtagtgccggataagaaataatggctacagtacctttaccatgcaaaagtttacccattaacttgcctgcttcaacgcctcccgcatagttatcggtcgcaacatgcgatacgaccggaacgccttccgcagcgacgtcaacggtgataacgggaataccggccttatcggctttaattatcgctgcctggacgcctttcgaatcgaccggagagataataatggcatccacttttttagtaataaaatcctcaacatcagaaagttgtttgtttaaatcctgattggcaatagagacacttaaattgacattgtctttttttgcctcttctttcatggcattcgcaagatcaatatagaaaggatgttgttgtgttaataatgacgcaccaattttatactcttttgccaacgaactttgcgagaacaatgccaggctcaccaacatagctgaaccaagtaatttaatatttttcataaacaatcctcattatttttgtagggtacaacgtcttaaatttttccttcactaccacagacgccaataatacgagttacgacttctttcatggcggcctttgcgggctgcatatagtgacgtggatcatttgccgcaggattgttgtagaaatatccttttaacgcatcggcaaacgcaattttcaattctgtcgcgacattcactttacaaataccgcgacgaatacagtgctgaacgtcctgttccgataagcccgaagcaccatgcaacaccagcggaatctccactcgctgacgaatctgttccagccgcacaaaatccagtcgtggttcatgcgcatataaaccatgtgctgtgccgattgctaccgccagggagtcaatttgggtacgttgaacaaactctgcagctgcggctggtgaggtataagcggaatctttttcatccacccgcagatcgtcctcctggccgccaagacgccctagctcggcctcaacgctaacatcaaagcgatggcaaaaggtggtaacttcttgcactcgcgcaatgttgtcttcaaatggcaaatgggagccatcaatcatgacagaacggatccctgcgcgaaccttgttaaaaatgtcatcactctcttcatgatggtcgagatgcaggactaacggcaggttgtactcgcgagccagcgattgtactaacgaaattaaacttcccacgccaccataacgatatgtaccgggtgttcccgccagcataacgggagagcgaagttgtgcagcgctctcaacaactacctgtaaagtttcaaggttatgaatgttgaaagcagggacggcatatccctctgactgggcttttttcagcatgtttttgcttgaaataatatacatcgcagctcctgttattggtcgttcgccttacaaaatgaagaaagagaatctttactttcattttgaaagcaaactagcacagcaaaagcagcaaaaagcgtgatgcatgtcgaacatcatcaaaataacttacaaaaaataacttaatttatttttcactttgcaagtgaaaccaatgaaaaccctgcataaatatgaatatattcatttatttttcaatgtattaagctattttcgttgcaatttttgacccatgattttcttttcgaattgtcgatatgattgaaggataactttcaaagaaaaatacaaggggctatagtgttacgcattaaaggccaatgaagagtgttaacgtgccgagaaaatcgtctaacctactgaaacgcagattaaaaattgcagaaattgttgccgcccagggtgaaatcaaagttgatgacttatctgcgcaacttggtgtctctggcgtgacgatccgcggcgatctcagttatctggagcaacagggatatttaaagcgatcatttggcggtgctattgcgacaccactctcctctgaaccagaagcgatacaaccgatcgcgccattgtctctggcacaacaaatggaaatagcacgacattgcgcacgattaattcgcgatcgtgacacgctatttcttggacatgggataatctgccgtaagatcattccattgctcagcgaagtgaaaaaactgcgtctgatcaccaacgatcccgaacatgcgctgctggcaaatcagtttattgatggcgaaataatactggctggcagtgaaatgttgcgccccgacaccgcactggccggaaaacagcttgaacaggcacttcagcatttcaccattacacatagcatcctggaaatcagccatctggatgctgatggtactttaaatatcaacgttcccagactcgccgctgcctggcagctctgtttcgatcatgcccagaataagacggttatcgttgccgccgatcctgcgccatcaacggctgctatcgggcatttgcatcaggcagaaaatgtgatcgtcagccgcagcattaacgaacaatatcagcaacaattgcagtcggctgatttcgttatcctttataccagtaatgagtgctttacctggtccaatcgcgaaaggcttcaggaatgagaggggttttgtgacaacaactatctgcgctatgggcgaattgctggccgagtttttgtcccgcaacccacatcaaaaattcactcagcctggggagtttatcgggccatttcccagcggtgcgccagcaatttttgctgctcaggtggcaaaactgtcccatcgggccatcttctttggatgtgttggtaatgatgattttgcccgactcattatagagcgtctccgtcatgaaggtgtcattaccgatgggatccatgttatgaacaatgccgtcacaggtacggcgttcgtgagttatcaaaatccccagcagcgggatttcgtctttaatatccctaacagcgcctgcggtttgtttactgccgagcacattgataaggatctgcttaaacagtgtaaccatctgcatattgtgggctcatcgttgttctcatttcgcatgatcgatgtcatgcgtaaagcaataacgacgatcaaatcggctggcggcaccgtttctttcgatcccaatattcgcaaagagatgctgagcattcctgaaatggcgcaggctctcgattatttgattgaatatacggatatttttatccccagcgaaagcgaactccctttcttcgcgcgtcacaaaaatctgtcagaggaacagattgttagcgatcttctccacggcggcgtaaaacatgtggcgataaaacgcgcccagcgtggggccagctattacaagcttaaaaacggtacattacacgcccagcatgttgcaggtcacgatatcgaaattatcgatccaacgggtgcaggcgactgctttggcgcaacgtttatcactcttttcttatccggtttcccggcacacaaggcgctgcaatatgcaaatgccagcggcgcgctcgccgtaatgcggcaaggtccgatggaagggatatcctcactggcagacattgaagactttttgcagcagcactgaacggcaattttctgtcagattattttccctgcctgaagacttgccgtagaattgcccgtttctcgtatccccccatgaggaggaccccttccgtg

SEQ ID NO: 363 - DNA, 1044 bp, Escherichia coli
atgaaaagcgaaatttggtcgtggattggcgatctctcgcaggttgccggaattaaacactatgagttacgtagtggcagagcaaagggtacagaagcgtttgatgtccgtactggtgcgggactggcatttacggtggtaaaagatcgcgcgctggatattgcatgggccagctacaaggacactgcgctctcttttatcacccccaacggtgttgtcgcccccgctttttttgagtctcagggcaacgggtttttacgtagcttttacgcggggttactgactacctgcggacttagctacattggcacgccctgtgaggatgaaggagaaacgctggggttacacgggcgtttggctgcgactccagcagaagaggtggggtatcgcacagaacggaccgacgacagcattgaatttgtcatcaatggcaaagtacgggaaacacgattgttcggtgaaaatctgacgctggaaaggaccattcgctgccgttatggcgaaaatgtgctgcgcattgaagacaaggtgactaatcatggtttcacccgccagccgctgcaaattctttatcactttaattacggctggcctttattatcgccacaggcagaaattttgctgtcggctaaaagcgtaacgccacgaaccccgcatgcggcggaagggttagccagtcatctggagatttgtaccccacagcccggttttgacgagcaggtttactatctcacgttgaatagcgacagtcaggggatgagtaaagttgcgctggtgaacgccgaactggggtggggaatttacgagaaattcgacatcatgcagctacccaactttatccagtggaaaaatttaggcgcgggtgaatatgttatgggactggaggtcagtaatagttttcttgacggtcgtgataaagaacgagcgcaggggcgtctgccctttattgaaccaggggaaacaaagaaatactgctttgagctgggaattgttgatggcgatgctgaaattagcgcgttgaaagcggaaattgcaggctaccgt

SEQ ID NO: 364 - protein, 348 aa, Escherichia coli
MKSEIWSWIGDLSQVAGIKHYELRSGRAKGTEAFDVRTGAGLAFTVVKDRALDIAWASYKDTALSFITPNGVVAPAFFESQGNGFLRSFYAGLLTTCGLSYIGTPCEDEGETLGLHGRLAATPAEEVGYRTERTDDSIEFVINGKVRETRLFGENLTLERTIRCRYGENVLRIEDKVTNHGFTRQPLQILYHFNYGWPLLSPQAEILLSAKSVTPRTPHAAEGLASHLEICTPQPGFDEQVYYLTLNSDSQGMSKVALVNAELGWGIYEKFDIMQLPNFIQWKNLGAGEYVMGLEVSNSFLDGRDKERAQGRLPFIEPGETKKYCFELGIVDGDAEISALKAEIAGYR

SEQ ID NO: 365 - DNA, 960 bp, Escherichia coli
atgagtaaggtcttcacaattggagaaattctggttgaaattatggcgagtaaaatcggccagccatttgatcaaccaggtatctggaacggcccttatcccagtggtgcgcccgctatttttatcgaccaggtgacacgtcttggcgttccgtgcggcatcattagctgcgtggggaatgatggctttggtgatattaatatacatcgtctggctgctgacggtgtggacatcagggggatttcagtcttacctctggaagccaccggtagtgcctttgttacttatcataactctggcgatcgcgattttatttttaatatcaagaatgctgcttgcggtaaattatcggcacagcatgttgatgaaaatattctgaaggattgtacccattttcatattatgggttcatccctgttttcattccatatggtagacgcagttaaaaaagcagtaaccatcgttaaagcaaatggtggcgttatttctttcgacccgaatattcgtaaagagatgctcgatattccagaaatgcgtgatgccctccactttgttcttgagttaacagatatctacatgcccagcgagggcgaagtgttgctcttgtcgccacactcgacaccggagcgtgcaatcgctggttttcttgaagaaggtgttaaagaggtgattgtgaagcgcggcaatcaaggagccagttactactccgcgaatgagcagtttcatgttgagagctatccggtggaagaagttgacccgaccggtgcgggagactgttttggtggcgcatggattgcctgccgccagctagggtttgacgcccatcgggcattacaatatgccaatgcctgcggtgcactggcggtaacccgacgtggcccaatggagggaacgtctcgccttatggaaatcgaaacgttcatccagcgccatgacatgtccattcgggaagcagcacaa

SEQ ID NO: 366 - protein, 320 aa, Escherichia coli
MSKVFTIGEILVEIMASKIGQPFDQPGIWNGPYPSGAPAIFIDQVTRLGVPCGIISCVGNDGFGDINIHRLAADGVDIRGISVLPLEATGSAFVTYHNSGDRDFIFNIKNAACGKLSAQHVDENILKDCTHFHIMGSSLFSFHMVDAVKKAVTIVKANGGVISFDPNIRKEMLDIPEMRDALHFVLELTDIYMPSEGEVLLLSPHSTPERAIAGFLEEGVKEVIVKRGNQGASYYSANEQFHVESYPVEEVDPTGAGDCFGGAWIACRQLGFDAHRALQYANACGALAVTRRGPMEGTSRLMEIETFIQRHDMSIREAAQ

SEQ ID NO: 367 - DNA, 987 bp, Escherichia coli
atgacagagaaaactcttgccagtccgaaaccttcggaaattcccattgcaaataattttaaaaaagtcttcaggcaatatggtggtatcctcagtggaatggtggtgttaatcattctgttcagttttattaatgacagtttttttaccgccaataacattactaatattattcttcaggtttcgataattgcaattaccgcctatggaatgacttatgtgcttttgcttggcgatattgatttatcggtcggttcaaccattgcattgattggcacatttgctgcgcttggggcttcatggggaattccatttgttttattggtcccattatccattattgcagcactggctttggggatgataaatggtggcttgacggctatagcggggatcccttcgtttattgtcaccgttgctactatggggatcttccgtggtatcgcttatatagtgaccgatggtatgcccatcatgattaaagatgatgcttttctggcgctggggaatggagaatttctctatatacctattcctatatggatattaatcatcttattgctgataaaccacttcattcttactaaaacaacctttggacgaaaaatttatatcactggtggtaataaagaagcggcaatttattcagggataaatgtcacccgcttgaaaattaaagtctttatgattacagccgtgctggcaggtatcagcgggatgatccttgcctcacgcctctattccgggcaaccgaattccgcgttgagctacgaactggatgctattgccgcggctgtactgggaggcaccagcctgaatggcggctatggaaccgtggtggggacggtgatcggcgcattaaccatcggcgttattaataatggcatgaacttaatgaatgttccttatttttaccagatggtggttaaaggattagtcattcttgtagccgtttattttgacgtaagaaataaaagaaaacgcagc

SEQ ID NO: 368 - protein, 329 aa, Escherichia coli
MTEKTLASPKPSEIPIANNFKKVFRQYGGILSGMVVLIILFSFINDSFFTANNITNIILQVSIIAITAYGMTYVLLLGDIDLSVGSTIALIGTFAALGASWGIPFVLLVPLSIIAALALGMINGGLTAIAGIPSFIVTVATMGIFRGIAYIVTDGMPIMIKDDAFLALGNGEFLYIPIPIWILIILLLINHFILTKTTFGRKIYITGGNKEAAIYSGINVTRLKIKVFMITAVLAGISGMILASRLYSGQPNSALSYELDAIAAAVLGGTSLNGGYGTVVGTVIGALTIGVINNGMNLMNVPYFYQMVVKGLVILVAVYFDVRNKRKRS

SEQ ID NO: 369 - DNA, 1488 bp, Escherichia coli
atgacggatgttattcttgatgtttcgcatattgcgaagacatttggtcatgttcaggcattaaaagatattacactctctttacgtaaagggcgggtgcatactttattaggcgagaatggtgccggtaaatcgacattaatgaaaatactggccggtgtttatccgccaacccagggaacgataacactacgtggtgaaaccatcaccattaataatccgcagcattctcgccagttagggattgcgattatttttcaggaactgagcctgagtaataatatgaccgtggcggaaaatatttatgccaataatgaaccgcgacgttttggtataattaacgataaagaaatgctcgcagattgccagaacctcctcgcggaactgggcatcccactagaccctctggaaatggtcggcaatatgtcgatggcacataggcaactggtagaaattgctaaagccttaagctatgcagcggatgtcgtgattatggatgaaccgacatcttcgctaagtgataatgaagcggagatcctgtttaacattattgaaaaattaaagcagcgaggctgtgcggttatttatatctctcatcgcatggatgaaattatgcggatttcagatgatatttcggtgatccgcggtgagtatatcgctacgcatgaaaagaaaaacagtgatatccagcacttgattgcccaaatggttggtcgggaaatgaaaaatatttggccagcacgtcttggggaaaaaccggatgaaaatgttcctgcaaaactggaagtaaaaaatctttcccatccttcgctttttaaagaggtcagtttcgctgtgcgtccgggggaagtcctcggattttttggcctggtgggggccgggcgttccgatgtgatgaaggcgctatttggcctcgtttcgtatcacgggactgtgttgattgatggtaaggaagtcaggatcgctaatccccaggctattgatcatggcattgcttttgtgaccgaaaaccgcaaggaagaagggttagtgctgatgcacgacatcaatatgaacacggcaccatgtggcgtttcaatagcttcgcggatgggactcatcaatcaccgacaagaagaggcgaagacgctgcaatcaattgccagaatgaacactaaagtgagttctgtgcatcaggcagtgggagcactgagcggcggtaatcaacagaaaatcgtgttatcgaagtggctggagaaaactccgcgtattttattgctcgatgaaccaacgcgcggagtggatgtcggcgcaaaatttgaaatctataacgtgatacgtcaactggctgcggcagggacagcaattattctggtgtcctctgaactgccagaagtcatggcacttagcgatcgtctggtggtaatgcgtaataaaacgattgccgatatttattcatgtgaaaatttaacgcagacacaggtaatgaccgctgcaacaggagtacgt

SEQ ID NO: 370 - protein, 496 aa, Escherichia coli
MTDVILDVSHIAKTFGHVQALKDITLSLRKGRVHTLLGENGAGKSTLMKILAGVYPPTQGTITLRGETITINNPQHSRQLGIAIIFQELSLSNNMTVAENIYANNEPRRFGIINDKEMLADCQNLLAELGIPLDPLEMVGNMSMAHRQLVEIAKALSYAADVVIMDEPTSSLSDNEAEILFNIIEKLKQRGCAVIYISHRMDEIMRISDDISVIRGEYIATHEKKNSDIQHLIAQMVGREMKNIWPARLGEKPDENVPAKLEVKNLSHPSLFKEVSFAVRPGEVLGFFGLVGAGRSDVMKALFGLVSYHGTVLIDGKEVRIANPQAIDHGIAFVTENRKEEGLVLMHDINMNTAPCGVSIASRMGLINHRQEEAKTLQSIARMNTKVSSVHQAVGALSGGNQQKIVLSKWLEKTPRILLLDEPTRGVDVGAKFEIYNVIRQLAAAGTAIILVSSELPEVMALSDRLVVMRNKTIADIYSCENLTQTQVMTAATGVR

SEQ ID NO: 371 - DNA, 888 bp, Escherichia coli
atgaaaaatattaaattacttggttcagctatgttggtgagcctggcattgttctcgcaaagttcgttggcaaaagagtataaaattggtgcgtcattattaacacaacaacatcctttctatattgatcttgcgaatgccatgaaagaagaggcaaaaaaagacaatgtcaatttaagtgtctctattgccaatcaggatttaaacaaacaactttctgatgttgaggattttattactaaaaaagtggatgccattattatctctccggtcgattcgaaaggcgtccaggcagcgataattaaagccgataaggccggtattcccgttatcaccgttgacgtcgctgcggaaggcgttccggtcgtatcgcatgttgcgaccgataactatgcgggaggcgttgaagcaggcaagttaatgggtaaacttttgcatggtaaaggtactgtagccattatttcttatccggcactacaatcggtggttgcgcgcgttgatggttttaagaaagggttaagcgatacaccggatattaaaattgttgctgaacagcctggtattacgcgggctgaagcgttaacgactgcgcaaaacattatgcaggcaaatgctaacctgaatggtctgtttggctttggtgatgatgcggcgctggcagcggttatcgcagcaaaatctgcgcataacgacaacatcaaaatcattggttttgacggcatgaaagaagcgcgtgatgccgttgacagtgaaaaaacgtttgcggccgtgattcggcaatatcccgatcaaatgggtgctaaagccattgatgccgctgttgatcacctcaatggtaaaccggtagaaaaaatgatcccggtacaacccggcgtttatacaggtaaa

SEQ ID NO: 372 - protein, 296 aa, Escherichia coli
MKNIKLLGSAMLVSLALFSQSSLAKEYKIGASLLTQQHPFYIDLANAMKEEAKKDNVNLSVSIANQDLNKQLSDVEDFITKKVDAIIISPVDSKGVQAAIIKADKAGIPVITVDVAAEGVPVVSHVATDNYAGGVEAGKLMGKLLHGKGTVAIISYPALQSVVARVDGFKKGLSDTPDIKIVAEQPGITRAEALTTAQNIMQANANLNGLFGFGDDAALAAVIAAKSAHNDNIKIIGFDGMKEARDAVDSEKTFAAVIRQYPDQMGAKAIDAAVDHLNGKPVEKMIPVQPGVYTGK

SEQ ID NO: 373 - DNA, 675 bp, Escherichia coli; identical to SEQ ID NO: 154

SEQ ID NO: 374 - DNA, 675 bp, Escherichia coli; identical to SEQ ID NO: 154

SEQ ID NO: 375 - DNA, 675 bp, Escherichia coli; identical to SEQ ID NO: 154

SEQ ID NO: 376 - DNA, 675 bp, Escherichia coli; identical to SEQ ID NO: 154

SEQ ID NO: 377 - DNA, 954 bp, Escherichia coli
gtgacaacaactatctgcgctatgggcgaattgctggccgagtttttgtcccgcaacccacatcaaaaattcactcagcctggggagtttatcgggccatttcccagcggtgcgccagcaatttttgctgctcaggtggcaaaactgtcccatcgggccatcttctttggatgtgttggtaatgatgattttgcccgactcattatagagcgtctccgtcatgaaggtgtcattaccgatgggatccatgttatgaacaatgccgtcacaggtacggcgttcgtgagttatcaaaatccccagcagcgggatttcgtctttaatatccctaacagcgcctgcggtttgtttactgccgagcacattgataaggatctgcttaaacagtgtaaccatctgcatattgtgggctcatcgttgttctcatttcgcatgatcgatgtcatgcgtaaagcaataacgacgatcaaatcggctggcggcaccgtttctttcgatcccaatattcgcaaagagatgctgagcattcctgaaatggcgcaggctctcgattatttgattgaatatacggatatttttatccccagcgaaagcgaactccctttcttcgcgcgtcacaaaaatctgtcagaggaacagattgttagcgatcttctccacggcggcgtaaaacatgtggcgataaaacgcgcccagcgtggggccagctattacaagcttaaaaacggtacattacacgcccagcatgttgcaggtcacgatatcgaaattatcgatccaacgggtgcaggcgactgctttggcgcaacgtttatcactcttttcttatccggtttcccggcacacaaggcgctgcaatatgcaaatgccagcggcgcgctcgccgtaatgcggcaaggtccgatggaagggatatcctcactggcagacattgaagactttttgcagcagcac

SEQ ID NO: 378 - protein, 345 aa, Escherichia coli
LISLSFIPVMSALPGPIAKGFRNERGFVTTTICAMGELLAEFLSRNPHQKFTQPGEFIGPFPSGAPAIFAAQVAKLSHRAIFFGCVGNDDFARLIIERLRHEGVITDGIHVMNNAVTGTAFVSYQNPQQRDFVFNIPNSACGLFTAEHIDKDLLKQCNHLHIVGSSLFSFRMIDVMRKAITTIKSAGGTVSFDPNIRKEMLSIPEMAQALDYLIEYTDIFIPSESELPFFARHKNLSEEQIVSDLLHGGVKHVAIKRAQRGASYYKLKNGTLHAQHVAGHDIEIIDPTGAGDCFGATFITLFLSGFPAHKALQYANASGALAVMRQGPMEGISSLADIEDFLQQH

SEQ ID NO: 379 - DNA, 9974 bp, Escherichia coli
gatgcccggttgtgaagtgcaaccgggctatttgaattccttagactattcattgtaaataattgaataacggccccagagctaaaatcgccaaacttaagcacgttacccaatcgccccacttcttcctatggcttctatttttgctacgccactggcaataatatcccaacgcaaaaccaagctgggcactaatcgggccgacaaaatcagtccacggctgcggccaaaaaggggaaaaattcaggggaagccagacaaatgtcagaaagaaatttcggatattttccagcaacgctgatttctctggagaaatataaagaatgaaattcgagagaattaaccagaaatagaccggagaaaagaccagccagcaatgtagcctgttttttaattcaggaggcgttctgcgggagaattgccaaccgatgccacccattacactgaaaaaaagtgcatatacaaccaataactcaagttgtaattcctgaagagaaatacgcacaaccaggagcggaaaggagaatattatttccgccagaaaagttaacgtgaatataagtacggctaaggcaataaccgtcggccataccaataatggtacgataacaaaaccgagaattacagggggaatataaagccggaatttaatcatttttattttcctggtgattcggatgatgcgtcatacatcgcgcataaacactcatcaatcatccagtcgtcttcccagatctgatactgtgtgccctgttcgggctgcttaagcgggttctcaatcgcctgccgcgcgcgttctttcaggatggattgattgttgaaggcccaggcattgatttgggcggtaatggctttatcgatatcgtcctggttatctctgatataaccgtcacgatacgtattcaataaacaggcaagagacgctgccgaccaaaatccgggaactgaaataatggcatcaagcaatggcgaaagagcgatatcggcacggaaaaacatttccagcttgtactgtaattcgacagcctcatccccggatacccaatcagtcatatactggcaagcaaattgctgcaatatttcccgttcatcctcacgccagttttctttactggcaaggtttatacgccgtagagaaaatacttcgtgaatattgtcaaattgcccctgcgcaacaaactccagtaaacgaggcagaaaataacgaacctcatcgctgttttgcggatcaggtcctggactactattccaggcattgattaaggaataaggaatcgctcgcaacgatgtattccgtaatgctttttgttcctgttgactcagacaatattcacaacaaaccacaaattgcttcggcgccggataacgacgaaaaatatgatatatctgctcaattaatgcctgcatggcaggagtggggtgcataattaccccctcgcccgctgatcgcgtgtaaagggttgatagacaaaacgagcattcgccgcattcaggcgaataatggcactacgagagagggaaaagctgggccgaatgcaataattacagtcccaacagctttcctctgtgcaattttccactgagtaatgacgcgcgtagagtttcagttcagcctgcttatcgcgaaatccgcgtaaactgttatcgttttgaaattgccaggcttctttaaacacttgaaagatataaacatcctcaatccaggcgtcacattttttaagcggacgctttgctatgatcacccgctcatccgggttgagcatcgccgtaaattgtacggtgaagtcatttgtcgtgttcagatcacattgaacatctggtacatcactgatatagaggtcaaatccaaagtcagcaccacaggcacaaagacggctaatggtggcggtatcgagggaaaatcccggccatacattgctggacgttaaaccaatatttaatgtgacatcatatcgagataatccctcaagaccggcagcaccggcgaacttttccccttcatccaggacctggttaatgagttgctgaacaatgccttcatcccagtatgttgatttgcagttggcaatcgtaatatccacgccagtgaatggatcagtaccggagaggcttgcaaataacgtatcaactaattccatttttattatccggcttaatgcaacattttattcatcggcacataacctacattttccaccaggtttttcccctgtagaattaaaaatatttttttgttttacattctgttcatccctattattgcattttattttgcggtgatagctaaaccgactctgtactggctcaaaaattactgatattccactcgcaatatagccagtgcattataacgacctgccgcaggcacttttccagttgtactaacaggtaaagtcagaaaagtaacatcagcagtttgcgcagaagcagcctagttttccaccaatctgaacggaacgcctactgatgttgccagggcatttaaatctacggagttttgctgactatccataatcataataccaacatcaggattatcttgtgcctgaataatactttgtttcccattggtatcacgtgtggcggaaatgttaccgtcgaataccaacgtcattaccgcatctgtatctttattcgtacaattaatcggaatagttgttgctacaggagtaacaccagcgggcttcgctccggcaccagcccggctcaattcactggcccacacatccggcatattaacagtaaaactcgtaccctcattaatagtgcaaccttgcggaacctgaatatttaagtttcctatgtaggcattaaagacagggataggaccatgttcggtagggatctggctgacatataatgacaccaataatacgttacttaatgaaacatcagatataatttttttatcaatcctgattttaatatatccttcagtacctgatgcccaattagatggtttgcttctgtcccccggataattggtattataattttcgaatggcacaattttatctgtcattgtgccattttgattataaagttttatatgagtagagacagatatttcatgggtgagtggaataaatacatcactcccttgatgatcaccactggcaccagacggatctattccagagacagcactgaagtaaatttcataatcatcaagagaattacaataagccttataggttccaaccttccagatttgtgatggcaatacagtgccaggcgcatttttgttgacatcagaaaccactatagtaccaaaattataagaaaaggatgcaggcgtagtattattactcggtgaacccggataacaatatgcacgttctcgccccatatcttcagcattagcaatagaagaaagaacatttgaaaatataataatcaataaaatgaaatatcttctataccaataagtatgtatacgcatatcatgtcctcagatatattattgactaaatgcaaagccagtaacatccaactgtgaaggatttaattttactttcaaaattggcaatacattattataaatgtccaatgtctgccatgctatttcacaaaccccttgcgatttacaccatgattgttggcgatggctaaatggtgcgaccataccaccatctataactttaccatcaacatgtaggttatagagtgtcacatatctggggcctggattataaacggtaacaatttcattttttcgtgcccagcgtaatttttgatatgacatattcgggtcttcagacaaatttgatggccgatagaatattttcatacgattgcggactgctatttgcaattgattatcagttttgactgaatgactattttccaacgttggtaatgctgcaacattcagtataaataaactttcccggtcggcaggtaaactgccaccaacacgattaattcttatttttgtatttttgtcaggcttcaaaataaacagtggcggagttgcgataaataccgtttcagaatatgagggcaaagattcaaccgttcccgtcaactgacgagcatcatcaggggagactgcaaccttgactaacatatctctgtctgaagtgtttttgagttcaacagatattgaggactgattttccggatacgcaaaacgcgttccaccgatcactaagcctgcttgtgctgtagagaataaaagggaaaataatactatgactaccttaatcataggtgacaataaacgatactgacgcatttgcatcccctggttggacattattttttaatgctttgtaagccgcaaaaaaatgcaatatattatcaactgatgatgtaagtgaaaaaaccatgcttttaacatcattactaatactgcctttgttcttatcaaaaatcgtaagtgcaagcccctctaccgagccatcttccagcttatataaactggcatcttcagaaactgtattgccggtaaactttatatacgcgttgccaacatcactaccacagcgggttaacgttatggaaaaataaaccttttcagtaacatcccctgcactccttaccgaactactgggtacgtctggcatattaactgtaaaattttttgactcatcagaaataatgcaggttttttcggtaattaacccttcaatacgaaccactccggcatgagtgatatcatcagcaaaagaatttgttgatattataaacaaaaataaactaatgaatatcttcatatctccctcactgataatcgatatcaaaatacaacagagcatttgcttgcccggcatgtacattttcctgagttgatttatagcgaagtttaaacgtcaaattagcatcaccgttttcatttaacactaaatcacgaaaacctgattcaccattaatggcaatcgccacatcattgttatccaatatttctattcccagtccagtcgcactatctgcaccggcggagagacgcagtaatgcgctattaatggcatctgcatcaccagtaaaccgcacattggcgctcacaccagaactataaacagtactttttgcagtcgggcatccttgtacattaatcgtaaacgtttgactcggagaaacatcacctacatttaaaaattcaattagcatcataagtgcccatttttaccgactgatctttacttccggtagtaatgtcacaagctttttgccaacaaaatcccagtaaatgtaacaacaactgaatcattggcctgccctgagagcggaaaagcaaaaaaagcgaaaaaaataaaaaatacagaatatttagagaatattaaattcattagcggcactccagagttgcatagctaacaggattatccagttctgtttcagggagcttgtaattagcctgacatttttgctgaacaccgtctccccactggatattaataacaccttctaaaggcaatcctgagagataaagttgtccattatcgccgacaatcccggtaatttgactactgtttttaatctgagcgctggctgtagcaccgaatgggactgatttattacgataacgaactgtgaacaaaccacgaataccgatatgagcagcaaactctgcacgaactaacgcaccttttcccggaataacttcagtggaagtgatatccagttcagtatgcatattcattgacataggatctaatgaaatattattacgtctatattctgttgcataaggaacaactgcatatccacgccagtcagtggatattcctgtcccccgctgaacatccacattattcgctccaggcgcttttatcaaaacattagtttcacctaatggttgactcaacgtaagaccattttcatgtacaacaagagcaccactgatgccatagtttatttgttgattaccttcattatcgtaactgtaggcggaattcaaggaaccatatgccccacgataattaacaccaacagaaccactactgctattatcctgattagcaaaaccatgttgtatgttataactgagattatgctgctccaacagagaaccagatacccccgtatattggtttacctgtccgtggttatcctgactataaccatacgttgcagtcatggcattcgatgatgagcgcccatcattcgtggaagataaccaattacttataggtaatgagacatttagcgagacaattttatccgcatttgtccctggtgatttactgtaattccacgcaacatttagatagatacccttaatactggtgttataaccaacttggtataaagaatcttttttatcagtattccagtatgtttgctgactagccgataaatacatagacccgtagttaccgaaaggttgcgatacactagcctgaaattttccacgtttgctataacgcaagttataaaaatcattccagttataaacgtaatctttatcatctaacgtttttggatcaacaacagtccctgacatttgttggtatgtcgtatcacttaaagtgtaaaagccctgggttgaataacgatagccaataatatggaatgctgttcctgtctgaactaacgatttggaataaagaaaacgataagattgcccttgatgtttgctcccatccacaagcgaactgttagcctgagtaacatcaaacgatgttgcaccaaatacacccagattcaggccaaggccgagcgccaacgcccggtaatcctcagagaattgtgccccaccataagccgtaatatcccagggtaaaccccaaattaattccccctgaaatacataaggacttttctggttatagctattgcttcgatattggccaaccgtagtagaatattttaaatgaccttctcgttgcaggatggggacagcggcataaggtacggtatagacagtttctgaattatcagactctttgatggtaacttccagatctcccgcagatgatgtcgggttaagatcgctaatctcaaacggtcccggcggcatataggtttgataaatgacataaccattctgtttgattgttacctgagcgcgacttttcgcaattccgcgcaccgtgggagcgaaaccactttgactatcgggcaacatattttcgtcagattccagttttatgccacgaatactaacactgtcgaaaacatctgatgatgaccatgtatctcctagcgttaattcacttctgaaaggaataataacgcgctgcaacgtactactgatatgctccagtttacctgctgaattactcccacgactccaggttgaataatcgcgaaaacgccatgcaccaatattgatcccagcgcgaagatttaaataatagttatttgaagagtaatcaccacgatcgttattaccagaaaagtcataattcagcaaaaaagctgtaataccgttatcccactgttctggtggaatatatccgcgagcgtcacgttttattatcgcctgtggaaaggtcagtttaagtctctgtgcatccagctccggcatgtaatgcacatcgggaaaccagatacgcaaatcaaggcaactattttcagatgaagccaaagcctgctctggcagcgcatttttgttaattccaaggcttaataagtcagcaagtgaaaggcagggaatcagttgattctcatcgtctgctttaaaagttacagtacgagagagtaaaggggaatcattgacccaaacttcgacttcatagctaccaggaagataagtcatccctttctcgaagcgggataagtcagcaacagcttcagtatcacccgacagaaaagcagggttaaagcgcattcccgcgattgaacatgcaggcataataaccagaagaagcggcacaacccgtttcatctgcttttgtgccgccatccaatattcgcatcttttgagctttaggttcatatccctgacctgtgttgcatctgaactattccgttgttactgcattattcctttctgccgctccgtcgtagcgccaaagtcattaattgtttgataagtaatttcaccagccaacgtcactggcgacgagaccgtaatatcacttttcggtggtacaaacatattgggcaatttactcccttgtactttaattcctgtcagtgtcaggtaataaggcgaaggattgataacttttagttgtttgccctcatacttaaaccgcaacatatttcgtgcttttcctggttgcacaggtagattttccgggcgataaaatagcttgattttgttttgtaatgccaactgtaaggtattcttctgtgtatttttctcatctgttggcggaattgctttaacattcatccaatacaaagtttcacgatcggtcggcaaattagtcttaccaagaaacatgatacgtaatgaagcttctttacgcgttggtaacataaagaggggaggagtgataacaaaatcctggctctttttttccgttttactgtcatcaacccatgattgaattaaataactggtgttgtcaccgctattttgcacactgagtgttatttgcttactttctgccggataaatcaatcgcgttacgccaaggccaaacccgcccgcggacgcattattaataaataatatcgatagtaaaaaaagaatccctgagcgtataatattttgtgatacttttaattcatccctgaatccacaaacccattttttatttccaataatacatttcatacagcatccttgttgatgaaataacatctgttattcatactctattaaataatttcaatctcaggttacaactttttgtaacctgaaatcgtatttatatttactcgtacagcacaacaaaacttgctgttgacttaactacacctggtgcaacagtgctaccgttttgagcataacctgcagtaaaggccgcgctgaaatcatgggtcgtagcatttcctggaattgtataagcggcggtggaggcgctaccctctgccgcagtggtattcaggttaatcagaccattattcgtcgtacctttggagtaaattcgaatccctacaccagtcgcccccgcattgccgctgttgtcagcatccgttgatccttctacttcgttagcgagcgttttattagcgctatctgcagtaccggtaaaacggaactcaattttctgatcatctgtattgctacattcggtcagattaatattgaaatcggtctggttgctcgccccctgtgcttctacgtcgataccagtgaaaaggttggaaggcacaaccggcaggacaacttcaatctgttttgaatcggttgcgaccttacaggtagctttcactacacggccagtaaagcggattttcccccccattgaatcaacgttgtcatccatatcagtgagcctgggataatcaacggtgctccagtcagtatccgccccaccaaattgtgttgcatcgccgggtgctgcggttaccgcagtagacatcagcatacctgatgccagtaatactgcggataaattagataaattgaatttcatttatacctttccttttgttaaaaaatccaagcaacattggtgtttttacattctgcgttaataagttatatctcacaaaaaaaaataagctgacgttggctaattccagaaggttctttagaagagtaattgagtgaataatattatatatgctgcttagtaatgtacctaaaataatccaaagccgcaataagtgagtttatactcacatataacacactgataatgataaaatttatttttacgtggagttgtaagaggggcaataaaacataaatcacatgaataatattaatgcattcataataaattaatattatttgaaataacaaaataccaaaaacattatcatcaatcgttatttaatatatattaatggtatatattaaatagaataacatacatcaaagttattgtttattgtgtatagaaataccgtgagttccactctgtattacttcagcggaacacacggtatttagccgtatttgaact

SEQ ID NO: 380 - DNA, 603 bp, Escherichia coli
atgattaaattccggctttatattccccctgtaattctcggttttgttatcgtaccattattggtatggccgacggttattgccttagccgtacttatattcacgttaacttttctggcggaaataatattctcctttccgctcctggttgtgcgtatttctcttcaggaattacaacttgagttattggttgtatatgcactttttttcagtgtaatgggtggcatcggttggcaattctcccgcagaacgcctcctgaattaaaaaacaggctacattgctggctggtcttttctccggtctatttctggttaattctctcgaatttcattctttatatttctccagagaaatcagcgttgctggaaaatatccgaaatttctttctgacatttgtctggcttcccctgaatttttcccctttttggccgcagccgtggactgattttgtcggcccgattagtgcccagcttggttttgcgttgggatattattgccagtggcgtagcaaaaatagaagccataggaagaagtggggcgattgggtaacgtgcttaagtttggcgattttagctctggggccgttattcaattatttacaa

SEQ ID NO: 381 - protein, 201 aa, Escherichia coli
MIKFRLYIPPVILGFVIVPLLVWPTVIALAVLIFTLTFLAEIIFSFPLLVVRISLQELQLELLVVYALFFSVMGGIGWQFSRRTPPELKNRLHCWLVFSPVYFWLILSNFILYISPEKSALLENIRNFFLTFVWLPLNFSPFWPQPWTDFVGPISAQLGFALGYYCQWRSKNRSHRKKWGDWVTCLSLAILALGPLFNYLQ

SEQ ID NO: 382 - DNA, 765 bp, Escherichia coli
atgcaccccactcctgccatgcaggcattaattgagcagatatatcatatttttcgtcgttatccggcgccgaagcaatttgtggtttgttgtgaatattgtctgagtcaacaggaacaaaaagcattacggaatacatcgttgcgagcgattccttattccttaatcaatgcctggaatagtagtccaggacctgatccgcaaaacagcgatgaggttcgttattttctgcctcgtttactggagtttgttgcgcaggggcaatttgacaatattcacgaagtattttctctacggcgtataaaccttgccagtaaagaaaactggcgtgaggatgaacgggaaatattgcagcaatttgcttgccagtatatgactgattgggtatccggggatgaggctgtcgaattacagtacaagctggaaatgtttttccgtgccgatatcgctctttcgccattgcttgatgccattatttcagttcccggattttggtcggcagcgtctcttgcctgtttattgaatacgtatcgtgacggttatatcagagataaccaggacgatatcgataaagccattaccgcccaaatcaatgcctgggccttcaacaatcaatccatcctgaaagaacgcgcgcggcaggcgattgagaacccgcttaagcagcccgaacagggcacacagtatcagatctgggaagacgactggatgattgatgagtgtttatgcgcgatgtatgacgcatcatccgaatcaccaggaaaa

SEQ ID NO: 383 - protein, 255 aa, Escherichia coli
MHPTPAMQALIEQIYHIFRRYPAPKQFVVCCEYCLSQQEQKALRNTSLRAIPYSLINAWNSSPGPDPQNSDEVRYFLPRLLEFVAQGQFDNIHEVFSLRRINLASKENWREDEREILQQFACQYMTDWVSGDEAVELQYKLEMFFRADIALSPLLDAIISVPGFWSAASLACLLNTYRDGYIRDNQDDIDKAITAQINAWAFNNQSILKERARQAIENPLKQPEQGTQYQIWEDDWMIDECLCAMYDASSESPGK

SEQ ID NO: 384 - DNA, 708 bp, Escherichia coli
atggaattagttgatacgttatttgcaagcctctccggtactgatccattcactggcgtggatattacgattgccaactgcaaatcaacatactgggatgaaggcattgttcagcaactcattaaccaggtcctggatgaaggggaaaagttcgccggtgctgccggtcttgagggattatctcgatatgatgtcacattaaatattggtttaacgtccagcaatgtatggccgggattttccctcgataccgccaccattagccgtctttgtgcctgtggtgctgactttggatttgacctctatatcagtgatgtaccagatgttcaatgtgatctgaacacgacaaatgacttcaccgtacaatttacggcgatgctcaacccggatgagcgggtgatcatagcaaagcgtccgcttaaaaaatgtgacgcctggattgaggatgtttatatctttcaagtgtttaaagaagcctggcaatttcaaaacgataacagtttacgcggatttcgcgataagcaggctgaactgaaactctacgcgcgtcattactcagtggaaaattgcacagaggaaagctgttgggactgtaattattgcattcggcccagcttttccctctctcgtagtgccattattcgcctgaatgcggcgaatgctcgttttgtctatcaaccctttacacgcgatcagcgggcgaggggg

SEQ ID NO: 385 - protein, 236 aa, Escherichia coli
MELVDTLFASLSGTDPFTGVDITIANCKSTYWDEGIVQQLINQVLDEGEKFAGAAGLEGLSRYDVTLNIGLTSSNVWPGFSLDTATISRLCACGADFGFDLYISDVPDVQCDLNTTNDFTVQFTAMLNPDERVIIAKRPLKKCDAWIEDVYIFQVFKEAWQFQNDNSLRGFRDKQAELKLYARHYSVENCTEESCWDCNYCIRPSFSLSRSAIIRLNAANARFVYQPFTRDQRARG

SEQ ID NO: 386 - DNA, 1008 bp, Escherichia coli
atgcgtatacatacttattggtatagaagatatttcattttattgattattatattttcaaatgttctttcttctattgctaatgctgaagatatggggcgagaacgtgcatattgttatccgggttcaccgagtaataatactacgcctgcatccttttcttataattttggtactatagtggtttctgatgtcaacaaaaatgcgcctggcactgtattgccatcacaaatctggaaggttggaacctataaggcttattgtaattctcttgatgattatgaaatttacttcagtgctgtctctggaatagatccgtctggtgccagtggtgatcatcaagggagtgatgtatttattccactcacccatgaaatatctgtctctactcatataaaactttataatcaaaatggcacaatgacagataaaattgtgccattcgaaaattataataccaattatccgggggacagaagcaaaccatctaattgggcatcaggtactgaaggatatattaaaatcaggattgataaaaaaattatatctgatgtttcattaagtaacgtattattggtgtcattatatgtcagccagatccctaccgaacatggtcctatccctgtctttaatgcctacataggaaacttaaatattcaggttccgcaaggttgcactattaatgagggtacgagttttactgttaatatgccggatgtgtgggccagtgaattgagccgggctggtgccggagcgaagcccgctggtgttactcctgtagcaacaactattccgattaattgtacgaataaagatacagatgcggtaatgacgttggtattcgacggtaacatttccgccacacgtgataccaatgggaaacaaagtattattcaggcacaagataatcctgatgttggtattatgattatggatagtcagcaaaactccgtagatttaaatgccctggcaacatcagtaggcgttccgttcagattggtggaaaac

SEQ ID NO: 387 - protein, 336 aa, Escherichia coli
MRIHTYWYRRYFILLIIIFSNVLSSIANAEDMGRERAYCYPGSPSNNTTPASFSYNFGTIVVSDVNKNAPGTVLPSQIWKVGTYKAYCNSLDDYEIYFSAVSGIDPSGASGDHQGSDVFIPLTHEISVSTHIKLYNQNGTMTDKIVPFENYNTNYPGDRSKPSNWASGTEGYIKIRIDKKIISDVSLSNVLLVSLYVSQIPTEHGPIPVFNAYIGNLNIQVPQGCTINEGTSFTVNMPDVWASELSRAGAGAKPAGVTPVATTIPINCTNKDTDAVMTLVFDGNISATRDTNGKQSIIQAQDNPDVGIMIMDSQQNSVDLNALATSVGVPFRLVEN

SEQ ID NO: 388 - DNA, 795 bp, Escherichia coli
atgtccaaccaggggatgcaaatgcgtcagtatcgtttattgtcacctatgattaaggtagtcatagtattattttcccttttattctctacagcacaagcaggcttagtgatcggtggaacgcgttttgcgtatccggaaaatcagtcctcaatatctgttgaactcaaaaacacttcagacagagatatgttagtcaaggttgcagtctcccctgatgatgctcgtcagttgacgggaacggttgaatctttgccctcatattctgaaacggtatttatcgcaactccgccactgtttattttgaagcctgacaaaaatacaaaaataagaattaatcgtgttggtggcagtttacctgccgaccgggaaagtttatttatactgaatgttgcagcattaccaacgttggaaaatagtcattcagtcaaaactgataatcaattgcaaatagcagtccgcaatcgtatgaaaatattctatcggccatcaaatttgtctgaagacccgaatatgtcatatcaaaaattacgctgggcacgaaaaaatgaaattgttaccgtttataatccaggccccagatatgtgacactctataacctacatgttgatggtaaagttatagatggtggtatggtcgcaccatttagccatcgccaacaatcatggtgtaaatcgcaaggggtttgtgaaatagcatggcagacattggacatttataataatgtattgccaattttgaaagtaaaattaaatccttcacagttggatgttactggctttgcatttagtcaa

SEQ ID NO: 389 - protein, 249 aa, Escherichia coli
MIKVVIVLFSLLFSTAQAGLVIGGTRFAYPENQSSISVELKNTSDRDMLVKVAVSPDDARQLTGTVESLPSYSETVFIATPPLFILKPDKNTKIRINRVGGSLPADRESLFILNVAALPTLENSHSVKTDNQLQIAVRNRMKIFYRPSNLSEDPNMSYQKLRWARKNEIVTVYNPGPRYVTLYNLHVDGKVIDGGMVAPFSHRQQSWCKSQGVCEIAWQTLDIYNNVLPILKVKLNPSQLDVTGFAFSQ

SEQ ID NO: 390 - DNA, 513 bp, Escherichia coli
atgaagatattcattagtttatttttgtttataatatcaacaaattcttttgctgatgatatcactcatgccggagtggttcgtattgaagggttaattaccgaaaaaacctgcattatttctgatgagtcaaaaaattttacagttaatatgccagacgtacccagtagttcggtaaggagtgcaggggatgttactgaaaaggtttatttttccataacgttaacccgctgtggtagtgatgttggcaacgcgtatataaagtttaccggcaatacagtttctgaagatgccagtttatataagctggaagatggctcggtagaggggcttgcacttacgatttttgataagaacaaaggcagtattagtaatgatgttaaaagcatggttttttcacttacatcatcagttgataatatattgcatttttttgcggcttacaaagcattaaaaaataatgtccaaccaggggatgcaaatgcgtcagtatcgtttattgtcacctatgat

SEQ ID NO: 391 - protein, 192 aa, Escherichia coli
MYMPGKQMLCCILISIISEGDMKIFISLFLFIISTNSFADDITHAGVVRIEGLITEKTCIISDESKNFTVNMPDVPSSSVRSAGDVTEKVYFSITLTRCGSDVGNAYIKFTGNTVSEDASLYKLEDGSVEGLALTIFDKNKGSISNDVKSMVFSLTSSVDNILHFFAAYKALKNNVQPGDANASVSFIVTYD

SEQ ID NO: 392 - DNA, 387 bp, Escherichia coli
atgatgctaattgaatttttaaatgtaggtgatgtttctccgagtcaaacgtttacgattaatgtacaaggatgcccgactgcaaaaagtactgtttatagttctggtgtgagcgccaatgtgcggtttactggtgatgcagatgccattaatagcgcattactgcgtctctccgccggtgcagatagtgcgactggactgggaatagaaatattggataacaatgatgtggcgattgccattaatggtgaatcaggttttcgtgatttagtgttaaatgaaaacggtgatgctaatttgacgtttaaacttcgctataaatcaactcaggaaaatgtacatgccgggcaagcaaatgctctgttgtattttgatatcgattatcag

SEQ ID NO: 393 - protein, 129 aa, Escherichia coli
MMLIEFLNVGDVSPSQTFTINVQGCPTAKSTVYSSGVSANVRFTGDADAINSALLRLSAGADSATGLGIEILDNNDVAIAINGESGFRDLVLNENGDANLTFKLRYKSTQENVHAGQANALLYFDIDYQ

SEQ ID NO: 394 - DNA, 2592 bp, Escherichia coli
atgaacctaaagctcaaaagatgcgaatattggatggcggcacaaaagcagatgaaacgggttgtgccgcttcttctggttattatgcctgcatgttcaatcgcgggaatgcgctttaaccctgcttttctgtcgggtgatactgaagctgttgctgacttatcccgcttcgagaaagggatgacttatcttcctggtagctatgaagtcgaagtttgggtcaatgattcccctttactctctcgtactgtaacttttaaagcagacgatgagaatcaactgattccctgcctttcacttgctgacttattaagccttggaattaacaaaaatgcgctgccagagcaggctttggcttcatctgaaaatagttgccttgatttgcgtatctggtttcccgatgtgcattacatgccggagctggatgcacagagacttaaactgacctttccacaggcgataataaaacgtgacgctcgcggatatattccaccagaacagtgggataacggtattacagcttttttgctgaattatgacttttctggtaataacgatcgtggtgattactcttcaaataactattatttaaatcttcgcgctgggatcaatattggtgcatggcgttttcgcgattattcaacctggagtcgtgggagtaattcagcaggtaaactggagcatatcagtagtacgttgcagcgcgttattattcctttcagaagtgaattaacgctaggagatacatggtcatcatcagatgttttcgacagtgttagtattcgtggcataaaactggaatctgacgaaaatatgttgcccgatagtcaaagtggtttcgctcccacggtgcgcggaattgcgaaaagtcgcgctcaggtaacaatcaaacagaatggttatgtcatttatcaaacctatatgccgccgggaccgtttgagattagcgatcttaacccgacatcatctgcgggagatctggaagttaccatcaaagagtctgataattcagaaactgtctataccgtaccttatgccgctgtccccatcctgcaacgagaaggtcatttaaaatattctactacggttggccaatatcgaagcaatagctataaccagaaaagtccttatgtatttcagggggaattaatttggggtttaccctgggatattacggcttatggtggggcacaattctctgaggattaccgggcgttggcgctcggccttggcctgaatctgggtgtatttggtgcaacatcgtttgatgttactcaggctaacagttcgcttgtggatgggagcaaacatcaagggcaatcttatcgttttctttattccaaatcgttagttcagacaggaacagcattccatattattggctatcgttattcaacccagggcttttacactttaagtgatacgacataccaacaaatgtcagggactgttgttgatccaaaaacgttagatgataaagattacgtttataactggaatgatttttataacttgcgttatagcaaacgtggaaaatttcaggctagtgtatcgcaacctttcggtaactacgggtctatgtatttatcggctagtcagcaaacatactggaatactgataaaaaagattctttataccaagttggttataacaccagtattaagggtatctatctaaatgttgcgtggaattacagtaaatcaccagggacaaatgcggataaaattgtctcgctaaatgtctcattacctataagtaattggttatcttccacgaatgatgggcgctcatcatcgaatgccatgactgcaacgtatggttatagtcaggataaccacggacaggtaaaccaatatacgggggtatctggttctctgttggagcagcataatctcagttataacatacaacatggttttgctaatcaggataatagcagtagtggttctgttggtgttaattatcgtggggcatatggttccttgaattccgcctacagttacgataatgaaggtaatcaacaaataaactatggcatcagtggtgctcttgttgtacatgaaaatggtcttacgttgagtcaaccattaggtgaaactaatgttttgataaaagcgcctggagcgaataatgtggatgttcagcgggggacaggaatatccactgactggcgtggatatgcagttgttccttatgcaacagaatatagacgtaataatatttcattagatcctatgtcaatgaatatgcatactgaactggatatcacttccactgaagttattccgggaaaaggtgcgttagttcgtgcagagtttgctgctcatatcggtattcgtggtttgttcacagttcgttatcgtaataaatcagtcccattcggtgctacagccagcgctcagattaaaaacagtagtcaaattaccgggattgtcggcgataatggacaactttatctctcaggattgcctttagaaggtgttattaatatccagtggggagacggtgttcagcaaaaatgtcaggctaattacaagctccctgaaacagaactggataatcctgttagctatgcaactctggagtgccgc

SEQ ID NO: 395 - protein, 864 aa, Escherichia coli
MNLKLKRCEYWMAAQKQMKRVVPLLLVIMPACSIAGMRFNPAFLSGDTEAVADLSRFEKGMTYLPGSYEVEVWVNDSPLLSRTVTFKADDENQLIPCLSLADLLSLGINKNALPEQALASSENSCLDLRIWFPDVHYMPELDAQRLKLTFPQAIIKRDARGYIPPEQWDNGITAFLLNYDFSGNNDRGDYSSNNYYLNLRAGINIGAWRFRDYSTWSRGSNSAGKLEHISSTLQRVIIPFRSELTLGDTWSSSDVFDSVSIRGIKLESDENMLPDSQSGFAPTVRGIAKSRAQVTIKQNGYVIYQTYMPPGPFEISDLNPTSSAGDLEVTIKESDNSETVYTVPYAAVPILQREGHLKYSTTVGQYRSNSYNQKSPYVFQGELIWGLPWDITAYGGAQFSEDYRALALGLGLNLGVFGATSFDVTQANSSLVDGSKHQGQSYRFLYSKSLVQTGTAFHIIGYRYSTQGFYTLSDTTYQQMSGTVVDPKTLDDKDYVYNWNDFYNLRYSKRGKFQASVSQPFGNYGSMYLSASQQTYWNTDKKDSLYQVGYNTSIKGIYLNVAWNYSKSPGTNADKIVSLNVSLPISNWLSSTNDGRSSSNAMTATYGYSQDNHGQVNQYTGVSGSLLEQHNLSYNIQHGFANQDNSSSGSVGVNYRGAYGSLNSAYSYDNEGNQQINYGISGALVVHENGLTLSQPLGETNVLIKAPGANNVDVQRGTGISTDWRGYAVVPYATEYRRNNISLDPMSMNMHTELDITSTEVIPGKGALVRAEFAAHIGIRGLFTVRYRNKSVPFGATASAQIKNSSQITGIVGDNGQLYLSGLPLEGVINIQWGDGVQQKCQANYKLPETELDNPVSYATLECR

SEQ ID NO: 396 - DNA, 777 bp, Escherichia coli
atgttatttcatcaacaaggatgctgtatgaaatgtattattggaaataaaaaatgggtttgtggattcagggatgaattaaaagtatcacaaaatattatacgctcagggattctttttttactatcgatattatttattaataatgcgtccgcgggcgggtttggccttggcgtaacgcgattgatttatccggcagaaagtaagcaaataacactcagtgtgcaaaatagcggtgacaacaccagttatttaattcaatcatgggttgatgacagtaaaacggaaaaaaagagccaggattttgttatcactcctcccctctttatgttaccaacgcgtaaagaagcttcattacgtatcatgtttcttggtaagactaatttgccgaccgatcgtgaaactttgtattggatgaatgttaaagcaattccgccaacagatgagaaaaatacacagaagaataccttacagttggcattacaaaacaaaatcaagctattttatcgcccggaaaatctacctgtgcaaccaggaaaagcacgaaatatgttgcggtttaagtatgagggcaaacaactaaaagttatcaatccttcgccttattacctgacactgacaggaattaaagtacaagggagtaaattgcccaatatgtttgtaccaccgaaaagtgatattacggtctcgtcgccagtgacgttggctggtgaaattacttatcaaacaattaatgactttggcgctacgacggagcggcagaaaggaataatgcag

SEQ ID NO: 397 - protein, 259 aa, Escherichia coli
MLFHQQGCCMKCIIGNKKWVCGFRDELKVSQNIIRSGILFLLSILFINNASAGGFGLGVTRLIYPAESKQITLSVQNSGDNTSYLIQSWVDDSKTEKKSQDFVITPPLFMLPTRKEASLRIMFLGKTNLPTDRETLYWMNVKAIPPTDEKNTQKNTLQLALQNKIKLFYRPENLPVQPGKARNMLRFKYEGKQLKVINPSPYYLTLTGIKVQGSKLPNMFVPPKSDITVSSPVTLAGEITYQTINDFGATTERQKGIMQ

SEQ ID NO: 398 - DNA, 702 bp, Escherichia coli
atgaaattcaatttatctaatttatccgcagtattactggcatcaggtatgctgatgtctactgcggtaaccgcagcacccggcgatgcaacacaatttggtggggcggatactgactggagcaccgttgattatcccaggctcactgatatggatgacaacgttgattcaatgggggggaaaatccgctttactggccgtgtagtgaaagctacctgtaaggtcgcaaccgattcaaaacagattgaagttgtcctgccggttgtgccttccaaccttttcactggtatcgacgtagaagcacagggggcgagcaaccagaccgatttcaatattaatctgaccgaatgtagcaatacagatgatcagaaaattgagttccgttttaccggtactgcagatagcgctaataaaacgctcgctaacgaagtagaaggatcaacggatgctgacaacagcggcaatgcgggggcgactggtgtagggattcgaatttactccaaaggtacgacgaataatggtctgattaacctgaataccactgcggcagagggtagcgcctccaccgccgcttatacaattccaggaaatgctacgacccatgatttcagcgcggcctttactgcaggttatgctcaaaacggtagcactgttgcaccaggtgtagttaagtcaacagcaagttttgttgtgctgtacgag

SEQ ID NO: 399 - protein, 234 aa, Escherichia coli
MKFNLSNLSAVLLASGMLMSTAVTAAPGDATQFGGADTDWSTVDYPRLTDMDDNVDSMGGKIRFTGRVVKATCKVATDSKQIEVVLPVVPSNLFTGIDVEAQGASNQTDFNINLTECSNTDDQKIEFRFTGTADSANKTLANEVEGSTDADNSGNAGATGVGIRIYSKGTTNNGLINLNTTAAEGSASTAAYTIPGNATTHDFSAAFTAGYAQNGSTVAPGVVKSTASFVVLYE

SEQ ID NO: 400 - DNA, 1378 bp, Escherichia coli
aagctacagcgggtagtgtgcgacgtacactgcttgctggttattaattcttttctcttgcgcgaatccttctttaacaattgtccgtaaatcggtccgcgccgtattatccgagacgctcagactcacactaatttcagcaactgtgtactctttccccggattggcgagcatcacattcaggagcgttacctggcgcggattcaggcgtttaagcacaccagagctaaacagcacactatcgagttttgcgcttcgttgtgtaatttcatcgatatgctgctgccagttttgcagagcacgtttaatgacacccgcctgatattcaaggaaataagtcagatccataccatctgattcagtgtactggtagctggcggcatatttgaccggtgcagcatgaagcaaactgctgatggaaatatatttaaagacatcgtagcccgatttcagcatataccagtaaaacagcgcccgactggtgcgcccgttgccatcccgaaacggatgttcatgggccagcataaaatgcagaatgcaggcacggaccaacggatgaatatacccttcatggctgtttaaccactggcaaactttttccagccgttccggtaacaatgccgcagcgggcggttgatgcactatattgccatcatagtcggcgatcacaacatcatctgtttcacgaaattctcccggacgatatttcgcgtcattgattccacccataccaatggcatgtaactggcgaataagcgcaggtgtcagcggttctgcgagtaagtgcggaatttccgccatcagccgggcatttcccgcaatcatatgctcgtcttcagtgcgtggcgaccgccctgtttccagcatttttctcgccaccagcgttgtagtattcgcaccttccagctgggagctggtgatcggctcttccaggcgtaactggcttaactcggctccggccccgcgtaaccgttcagtctgatctttcagcgccagcgcggtagcacgtttgtcgacaagctcgcacgcttctgcaatcaccggggtaatgttgaatccggcctgttcacccgcttcattgcaataattaattcgttggatcgccgcgttgcgcgccagacgggtaagcgtccacgccacatcgacgttttctccttttttgatgcggtactgcaactcatcaaaaggcagataacgtcctttttcatcggtaacccggttaaagcgcaggtgggccaggagttcctcacccgataagtgtgataaaggaataagtccgggaggtgatttgatagccatgtgcttatctcaaaaaagcgcaatattgagatagtgtatagcaggaaagagaaactatctcaaaaaaagcaagttttga

SEQ ID NO: 401 - DNA, 1293 bp, Escherichia coli
atggctatcaaatcacctcccggacttattcctttatcacacttatcgggtgaggaactcctggcccacctgcgctttaaccgggttaccgatgaaaaaggacgttatctgccttttgatgagttgcagtaccgcatcaaaaaaggagaaaacgtcgatgtggcgtggacgcttacccgtctggcgcgcaacgcggcgatccaacgaattaattattgcaatgaagcgggtgaacaggccggattcaacattaccccggtgattgcagaagcgtgcgagcttgtcgacaaacgtgctaccgcgctggcgctgaaagatcagactgaacggttacgcggggccggagccgagttaagccagttacgcctggaagagccgatcaccagctcccagctggaaggtgcgaatactacaacgctggtggcgagaaaaatgctggaaacagggcggtcgccacgcactgaagacgagcatatgattgcgggaaatgcccggctgatggcggaaattccgcacttactcgcagaaccgctgacacctgcgcttattcgccagttacatgccattggtatgggtggaatcaatgacgcgaaatatcgtccgggagaatttcgtgaaacagatgatgttgtgatcgccgactatgatggcaatatagtgcatcaaccgcccgctgcggcattgttaccggaacggctggaaaaagtttgccagtggttaaacagccatgaagggtatattcatccgttggtccgtgcctgcattctgcattttatgctggcccatgaacatccgtttcgggatggcaacgggcgcaccagtcgggcgctgttttactggtatatgctgaaatcgggctacgatgtctttaaatatatttccatcagcagtttgcttcatgctgcaccggtcaaatatgccgccagctaccagtacactgaatcagatggtatggatctgacttatttccttgaatatcaggcgggtgtcattaaacgtgctctgcaaaactggcagcagcatatcgatgaaattacacaacgaagcgcaaaactcgatagtgtgctgtttagctctggtgtgcttaaacgcctgaatccgcgccaggtaacgctcctgaatgtgatgctcgccaatccggggaaagagtacacagttgctgaaattagtgtgagtctgagcgtctcggataatacggcgcggaccgatttacggacaattgttaaagaaggattcgcgcaagagaaaagaattaataaccagcaagcagtgtacgtcgcacactacccgctg

SEQ ID NO: 402 - protein, 431 aa, Escherichia coli
MAIKSPPGLIPLSHLSGEELLAHLRFNRVTDEKGRYLPFDELQYRIKKGENVDVAWTLTRLARNAAIQRINYCNEAGEQAGFNITPVIAEACELVDKRATALALKDQTERLRGAGAELSQLRLEEPITSSQLEGANTTTLVARKMLETGRSPRTEDEHMIAGNARLMAEIPHLLAEPLTPALIRQLHAIGMGGINDAKYRPGEFRETDDVVIADYDGNIVHQPPAAALLPERLEKVCQWLNSHEGYIHPLVRACILHFMLAHEHPFRDGNGRTSRALFYWYMLKSGYDVFKYISISSLLHAAPVKYAASYQYTESDGMDLTYFLEYQAGVIKRALQNWQQHIDEITQRSAKLDSVLFSSGVLKRLNPRQVTLLNVMLANPGKEYTVAEISVSLSVSDNTARTDLRTIVKEGFAQEKRINNQQAVYVAHYPL

SEQ ID NO: 403 - DNA, 1486 bp, Escherichia coli
ttacatgaaagcccgctaatgcgggctttttttatgggataagacatatgaaccaactgcaagaaatcattcagatactaagtactggtgatgaaggcacaacaaatgctctcataaaacgaagatccttcttttctctatcgggaaaaaggagcttgctgcatgggtaaatcatgagataaacggttatcctgattcagtttcccttccagattatagaattgttggcacaagaattcttgcagatctgaataacggcgttcgcctatatagagcttttccgttaccgattggttatctaagtgaagatgactatgaagatgctacaaccagtaatgtgaggctttcaatcagtcaaatcgaagaactagtgaccaatgctggtgatagccatgctcttcagcagccaattcctttagattacgcgttagttaagtactgcaaaggtatcgataaaggctatgagttaacacgctgttataaagagatcgcactacataactttacttccatcttaactcaggtcaggtcacggctacttgattttatacttgaactttctgatcaagtttctgaaataccagatgagaaaaacatgacagaaaaacttaaaaatatcgacacgtcttcattattccataactcaatttttggagacaatactgtcataaacttcggaaatgaaaactcattttctgtgaataaccacgtcgtaaaaaacgacactgagtcattaaaagagtttctctcagctcaggggttccctaaatctgatgttaacgatttagaaattgctattggtgaagatggcccgatagctaacaaacgtggtgaatatggtcaatctgttagtaaatggttggcaaatattgcgagtaaagcagcccatggtactttgggcataggaatagctgctgcaactcaagcagctacagcggctctgaaaaaatactacggtctatcataaccatcatggggtgtcgggggtcggaggttcaaatcctctcgtgccgacaaaaaatcccttaagaaccagcctattatggctggtttttttatgattgttttttatgcggagaaataccggggaataattggggtaaaacacctttaggctattcacttagcctaccaccatcaaaatctttccgaatgtatccatctcttttttcttatgcagctaaaacgaagtcttgatactgtttatttacacagataagaataatactgtctacaaacgcagtacaaaagaagtgttatgcgtattgagatctccatagccaaagacaaaatgaccaaatgccaaacggtgctgtggatgcgttaaaggaagaattaactcgacgcatcagtaagcgttatgacgatgtagaggtgatcgtaaaagccaccagcaacgatggcctttctgttacgcgcaccgccgataaagattcagctaaaacttttgttcaggaaactctgaaagatacctgggagtctgctg

SEQ ID NO: 404 - DNA, 717 bp, Escherichia coli
ctgaataacggcgttcgcctatatagagcttttccgttaccgattggttatctaagtgaagatgactatgaagatgctacaaccagtaatgtgaggctttcaatcagtcaaatcgaagaactagtgaccaatgctggtgatagccatgctcttcagcagccaattcctttagattacgcgttagttaagtactgcaaaggtatcgataaaggctatgagttaacacgctgttataaagagatcgcactacataactttacttccatcttaactcaggtcaggtcacggctacttgattttatacttgaactttctgatcaagtttctgaaataccagatgagaaaaacatgacagaaaaacttaaaaatatcgacacgtcttcattattccataactcaatttttggagacaatactgtcataaacttcggaaatgaaaactcattttctgtgaataaccacgtcgtaaaaaacgacactgagtcattaaaagagtttctctcagctcaggggttccctaaatctgatgttaacgatttagaaattgctattggtgaagatggcccgatagctaacaaacgtggtgaatatggtcaatctgttagtaaatggttggcaaatattgcgagtaaagcagcccatggtactttgggcataggaatagctgctgcaactcaagcagctacagcggctctgaaaaaatactacggtctatca

SEQ ID NO: 405 - protein, 239 aa, Escherichia coli
LNNGVRLYRAFPLPIGYLSEDDYEDATTSNVRLSISQIEELVTNAGDSHALQQPIPLDYALVKYCKGIDKGYELTRCYKEIALHNFTSILTQVRSRLLDFILELSDQVSEIPDEKNMTEKLKNIDTSSLFHNSIFGDNTVINFGNENSFSVNNHVVKNDTESLKEFLSAQGFPKSDVNDLEIAIGEDGPIANKRGEYGQSVSKWLANIASKAAHGTLGIGIAAATQAATAALKKYYGLS

SEQ ID NO: 406 - DNA, 186 bp, Escherichia coli
atgccaaacggtgctgtggatgcgttaaaggaagaattaactcgacgcatcagtaagcgttatgacgatgtagaggtgatcgtaaaagccaccagcaacgatggcctttctgttacgcgcaccgccgataaagattcagctaaaacttttgttcaggaaactctgaaagatacctgggagtctgct

SEQ ID NO: 407 - protein, 62 aa, Escherichia coli
MPNGAVDALKEELTRRISKRYDDVEVIVKATSNDGLSVTRTADKDSAKTFVQETLKDTWESA

SEQ ID NO: 408 - DNA, 3639 bp, Escherichia coli
agctcaccttttttcacccacgattaaccaacagccagaccagcagacacgccaccaccggcacagcaaaatccatcaggcttgccacatcccacacgcgcggatcaaaaccgccccaccacggcatgttaatcctcttgccatgcccaaacatttcaatccagcgatattccgcctgggtgtgttcacgcgcaatgaagaacgtacaaccggctatcgccccgtaagcccagttcccggtaaaaagaccaaccagtagctgcgcagccacagcacaaagcgcatgaaggaaaggtgttatatccattttcatcctacccaataaaacggggcgctcggccccttgatattatttagacgcaagcgccgcctcaattgcagataatctttgtcttaattctgcgttttcttcttccagtgctgttattctgtcgtctgactctctggctacctgaacaagcaagccagtaacaccagaataatctactgtgtaataacgttcaccttcttcaccttccgatccgcttgcaccgtcctgatatttcattgcggaacctacaacttctgggattgcttccagagcttcctgtgcaatgacaccagcatagggcataccgttttctttaagcgtgtatgtatagccgttcattttacggatgcggtcggttgcattatcgatcacctgaatgttgtctttcagatcccggtcggaatgctggttaaatgcggtggcatgacatgcaccattaacgcttaacatataggtgttatcggtatttttttgcgcatagaacatataagcgccaccatcaacaccgacttcataaacaacaggacggctggagttgccccacaattgagcagtaacaccagcataagcggttccctgtgtgtttaatgtcatggttgacccatgattggcatatttgatctgtaatgtgtcggtgtaatcaaatttaataagcgcgttacttccacgcttgctgtatgacataaggcagttacccattttgaggtatccgctgtcacctgggaaaaatcatcgtaccgccataaaggttggtaaagtcccagcaaatgtttgtcccgttatcgttcaggttaaggcgcgccattgcgttacctggactgtctatccattttttgaggtatagttcgcaatacgcatcctcaacacctgccgtcctgtgagttgagcggagttttctcccaaatatagctccgctagttggcaatacctgctgataccatgaagcagaccagtcaccaacgatttcatctttgctgtctacatataattttgttgcgtagcttccttgatcgttttttaatttgctaacgtcggattttagcgttttgatgtcatcaggaattactgtcgatgtagccatttgtctccctcacatccagccacgaagttgatgctcaacaacaatcgcgtatttatcgaatattgacgatttttttgcatcattaatgatgcgcacgtttacaaaatatccgtcctccttaacacataccggttcgccatcttcagtcagttctccggtttctttgtacacgttacctatcacgtcaataagaatatcaccctgcatcgactcgtcatcataatagccaatactctccataaaggccgaaaagtcggccctgtctgcaaatttgagcgttaaatctttcatttaatactctcccccatttgcgcatcagttaattctttatgccagagacgaagatttctcaaatggccgaatagatgacgagttcccgatgtggcttgacctccaattcgaataaaggtccgtgtttttacgcccgtccactccgttttcatggttttagtagcctcaccgttagaaactactcgtttagtaccatcagaataaatattaaaaccaccaatgaattttcgaacatcagttcgaccagcaaacacactagaaacgtaagtacttgtcgacgctttataagtttgcatataaagctgaccgtaatatttctcagttgtgttaaaagcgtatgtaattgactcaataggtggcacaccagaaaaatcaaaaatacgcggtgctacattaggaggaatatcgccccaatttctattaacctcgaccaggcacgtaagcggtctattatagatattattttcagttgggatcgtcaccatatcactggagcgggttgcgggtacagttgtcgtaataacaaaagatgaagcacatccgccgttttcaaattgtggtgttgcaaggtaaatataatctcccgcttcagttacaccaccttttttcggcgcatactgaatcattgcgccaattaaggtttcaccttcaacagcttctatagttgcctcatagaaaatccaccctgtaaccggatctttagttgcagtagctgctattctattggctgctccgccagttttttctattatcagagttccgaaagttaaataagcatctcctaaaaatgtataaaccgacccatcgtatttttcaaaacgcaaacgacaacgaagaccatcaggagctttaaccctgcatgaaacagtgcaatacttattatcgccactaacatcaatcccccgggatgcactgcatgtatgcagactaagtgcagatgattgtcctgtcatattatcttttgttcgcattttggcatatgaaaaaccaaattcatcaacaccattattagttttatcgatattgctggtactcgtccattcagcggggatattggatttaacaaaatagttagtgcgctgtccttcaatcaataaaccttctttttcaaatcgtggctcatcaattttagcaacactaaatacgcctgatttattgatatatgtggcagttgatgcgcgtttaaactttacaaccttatcgccaggcatcgttatttcatcatcaccaataacaatctttttatatgacggcgaaaagcccgtaatcatatccagtgaatcgttaaacggtatccacacatcgggaagcggctgcaaaacttgtttatacggctccgcagcctggcttgcatactctctggctgcgtcttcacttgcttttgcagccgtctggcttgctgccgatgctttcgctgagttagccgccgcagtctcgctcgcctttgcgttggtttcactggtttttgcagctttttgactgttggctgatgcagaggcagaagaagccgccgcacttgcagaaccagctgcggcactctcgctttgggctgctgcatcctgactgtttttcgccgcagtttcactggctttggcattcgtttcgctggtcttcgctgccgtctggctggactttgcgttagtttcactcgtcttcgcagctttctggctgttagcccgcagcagttgctgatccagttgctgaagtcgcagaaccggctgccgcgctctcgctttgggctgctgcaacctggctgttttttgccgcagtttcactggctttggcattcgtttcgctggtcttcgctgccgtctggctggactttgcgttggtttcgctcgtctttgcggctgtctcgctatttttcgcgttggtttctgattttttggctgctgcgcggagttttctgatgcagtctgtgaggtcgctgccgctgtgcactatagctgcattcgtt

SEQ ID NO: 409 - DNA, 657 bp, Escherichia coli
atgggtaactgccttatgtcatacagcaagcgtggaagtaacgcgcttattaaatttgattacaccgacacattacagatcaaatatgccaatcatgggtcaaccatgacattaaacacacagggaaccgcttatgctggtgttactgctcaattgtggggcaactccagccgtcctgttgtttatgaagtcggtgttgatggtggcgcttatatgttctatgcgcaaaaaaataccgataacacctatatgttaagcgttaatggtgcatgtcatgccaccgcatttaaccagcattccgaccgggatctgaaagacaacattcaggtgatcgataatgcaaccgaccgcatccgtaaaatgaacggctatacatacacgcttaaagaaaacggtatgccctatgctggtgtcattgcacaggaagctctggaagcaatcccagaagttgtaggttccgcaatgaaatatcaggacggtgcaagcggatcggaaggtgaagaaggtgaacgttattacacagtagattattctggtgttactggcttgcttgttcaggtagccagagagtcagacgacagaataacagcactggaagaagaaaacgcagaattaagacaaagattatctgcaattgaggcggcgcttgcgtctaaa

SEQ ID NO: 410 - protein, 219 aa, Escherichia coli
MGNCLMSYSKRGSNALIKFDYTDTLQIKYANHGSTMTLNTQGTAYAGVTAQLWGNSSRPVVYEVGVDGGAYMFYAQKNTDNTYMLSVNGACHATAFNQHSDRDLKDNIQVIDNATDRIRKMNGYTYTLKENGMPYAGVIAQEALEAIPEVVGSAMKYQDGASGSEGEEGERYYTVDYSGVTGLLVQVARESDDRITALEEENAELRQRLSAIEAALASK

SEQ ID NO: 411 - DNA, 363 bp, Escherichia coli
atggctacatcgacagtaattcctgatgacatcaaaacgctaaaatccgacgttagcaaattaaaaaacgatcaaggaagctacgcaacaaaattatatgtagacagcaaagatgaaatcgttggtgactggtctgcttcatggtatcagcaggtattgccaactagcggagctatatttgggagaaaactccgctcaactcacaggacggcaggtgttgaggatgcgtattgcgaactatacctcaaaaaatggatagacagtccaggtaacgcaatggcgcgccttaacctgaacgataacgggacaaacatttgctgggactttaccaacctttatggcggtacgatgatttttcccagg

SEQ ID NO: 412 - protein, 121 aa, Escherichia coli
MATSTVIPDDIKTLKSDVSKLKNDQGSYATKLYVDSKDEIVGDWSASWYQQVLPTSGAIFGRKLRSTHRTAGVEDAYCELYLKKWIDSPGNAMARLNLNDNGTNICWDFTNLYGGTMIFPR

SEQ ID NO: 413 - DNA, 279 bp, Escherichia coli
atgaaagatttaacgctcaaatttgcagacagggccgacttttcggcctttatggagagtattggctattatgatgacgagtcgatgcagggtgatattcttattgacgtgataggtaacgtgtacaaagaaaccggagaactgactgaagatggcgaaccggtatgtgttaaggaggacggatattttgtaaacgtgcgcatcattaatgatgcaaaaaaatcgtcaatattcgataaatacgcgattgttgttgagcatcaacttcgtggctggatg

SEQ ID NO: 414 - protein, 93 aa, Escherichia coli
MKDLTLKFADRADFSAFMESIGYYDDESMQGDILIDVIGNVYKETGELTEDGEPVCVKEDGYFVNVRIINDAKKSSIFDKYAIVVEHQLRGWM

SEQ ID NO: 415 - DNA, 1788 bp, Escherichia coli
atgccaaagccagtgaaactgcggcaaaaaacagccaggttgcagcagcccaaagcgagagcgcggcagccggttctgcgacttcagcaactggatcagcaactgctgcgggctaacagccagaaagctgcgaagacgagtgaaactaacgcaaagtccagccagacggcagcgaagaccagcgaaacgaatgccaaagccagtgaaactgcggcgaaaaacagtcaggatgcagcagcccaaagcgagagtgccgcagctggttctgcaagtgcggcggcttcttctgcctctgcatcagccaacagtcaaaaagctgcaaaaaccagtgaaaccaacgcaaaggcgagcgagactgcggcggctaactcagcgaaagcatcggcagcaagccagacggctgcaaaagcaagtgaagacgcagccagagagtatgcaagccaggctgcggagccgtataaacaagttttgcagccgcttcccgatgtgtggataccgtttaacgattcactggatatgattacgggcttttcgccgtcatataaaaagattgttattggtgatgatgaaataacgatgcctggcgataaggttgtaaagtttaaacgcgcatcaactgccacatatatcaataaatcaggcgtatttagtgttgctaaaattgatgagccacgatttgaaaaagaaggtttattgattgaaggacagcgcactaactattttgttaaatccaatatccccgctgaatggacgagtaccagcaatatcgataaaactaataatggtgttgatgaatttggtttttcatatgccaaaatgcgaacaaaagataatatgacaggacaatcatctgcacttagtctgcatacatgcagtgcatcccgggggattgatgttagtggcgataataagtattgcactgtttcatgcagggttaaagctcctgatggtcttcgttgtcgtttgcgttttgaaaaatacgatgggtcggtttatacatttttaggagatgcttatttaactttcggaactctgataatagaaaaaactggcggagcagccaatagaatagcagctactgcaactaaagatccggttacagggtggattttctatgaggcaactatagaagctgttgaaggtgaaaccttaattggcgcaatgattcagtatgcgccgaaaaaaggtggtgtaactgaagcgggagattatatttaccttgcaacaccacaatttgaaaacggcggatgtgcttcatcttttgttattacgacaactgtacccgcaacccgctccagtgatatggtgacgatcccaactgaaaataatatctataatagaccgcttacgtgcctggtcgaggttaatagaaattggggcgatattcctcctaatgtagcaccgcgtatttttgatttttctggtgtgccacctattgagtcaattacatacgcttttaacacaactgagaaatattacggtcagctttatatgcaaacttataaagcgtcgacaagtacttacgtttctagtgtgtttgctggtcgaactgatgttcgaaaattcattggtggttttaatatttattctgatggtactaaacgagtagtttctaacggtgaggctactaaaaccatgaaaacggagtggacgggcgtaaaaacacggacctttattcgaattggaggtcaagccacatcgggaactcgtcatctattcggccatttgagaaatcttcgtctctggcataaagaattaactgatgcgcaaatgggggagagtattaaa

SEQ ID NO: 416 - protein, 596 aa, Escherichia coli
MPKPVKLRQKTARLQQPKARARQPVLRLQQLDQQLLRANSQKAAKTSETNAKSSQTAAKTSETNAKASETAAKNSQDAAAQSESAAAGSASAAASSASASANSQKAAKTSETNAKASETAAANSAKASAASQTAAKASEDAAREYASQAAEPYKQVLQPLPDVWIPFNDSLDMITGFSPSYKKIVIGDDEITMPGDKVVKFKRASTATYINKSGVFSVAKIDEPRFEKEGLLIEGQRTNYFVKSNIPAEWTSTSNIDKTNNGVDEFGFSYAKMRTKDNMTGQSSALSLHTCSASRGIDVSGDNKYCTVSCRVKAPDGLRCRLRFEKYDGSVYTFLGDAYLTFGTLIIEKTGGAANRIAATATKDPVTGWIFYEATIEAVEGETLIGAMIQYAPKKGGVTEAGDYIYLATPQFENGGCASSFVITTTVPATRSSDMVTIPTENNIYNRPLTCLVEVNRNWGDIPPNVAPRIFDFSGVPPIESITYAFNTTEKYYGQLYMQTYKASTSTYVSSVFAGRTDVRKFIGGFNIYSDGTKRVVSNGEATKTMKTEWTGVKTRTFIRIGGQATSGTRHLFGHLRNLRLWHKELTDAQMGESIK

SEQ ID NO: 417 - DNA, 727 bp, Escherichia coli
tccactccacaataaatatcctccggcatagccggaggtttttcaaatgcgcctataaggctctcttaccagccgcgccctaacaggcgcacacgatctgacatttgcatccaacttcgttacttacggcccgtaaacgggctgcccggatagggaatcgataactgctctcccattttatcctcttcaagctggtgctttatgtaatcctgtatcttcgccgtgttcttacccactgtatcgacgtagtaccctctgcaccagaactccctgttcctgtatttgaatttcaaatcaccaaactgctcgtaaagcatcagactgcttttccctttcagatatcccataaacccggatacgctcattttgggcgggatctccacaagcatatggatatgatctgcacagcattcagcttccagaatccgtacgcttttccactcacacagctttctcaaaatactgcctattgctctacgcttctctctgtagaacacctgtcttcggtattttggcgcaaaaactatgtgatatttacagttccatcgggtgtgcgctaagctcttttcgttccccattgggacccccttttgatttcttgtttgacacttgcagttgccagaccgcaaagtgttttaacaaatcaaaaggggttttaataactggctcaaagctgaaagctttccggaacccccagcctagctgggggttttctgtgcacaaaaaa

SEQ ID NO: 418 - DNA, 507 bp, Escherichia coli
ttgcggtctggcaactgcaagtgtcaaacaagaaatcaaaagggggtcccaatggggaacgaaaagagcttagcgcacacccgatggaactgtaaatatcacatagtttttgcgccaaaataccgaagacaggtgttctacagagagaagcgtagagcaataggcagtattttgagaaagctgtgtgagtggaaaagcgtacggattctggaagctgaatgctgtgcagatcatatccatatgcttgtggagatcccgcccaaaatgagcgtatccgggtttatgggatatctgaaagggaaaagcagtctgatgctttacgagcagtttggtgatttgaaattcaaatacaggaacagggagttctggtgcagagggtactacgtcgatacagtgggtaagaacacggcgaagatacaggattacataaagcaccagcttgaagaggataaaatgggagagcagttatcgattccctatccgggcagcccgtttacgggccgtaag

SEQ ID NO: 419 - protein, 169 aa, Escherichia coli
LRSGNCKCQTRNQKGVPMGNEKSLAHTRWNCKYHIVFAPKYRRQVFYREKRRAIGSILRKLCEWKSVRILEAECCADHIHMLVEIPPKMSVSGFMGYLKGKSSLMLYEQFGDLKFKYRNREFWCRGYYVDTVGKNTAKIQDYIKHQLEEDKMGEQLSIPYPGSPFTGRK

SEQ ID NO: 420 - DNA, 2129 bp, Escherichia coli
cgttctgtggtttctgttaatcgatttatccattagatttttcataaagctcaggtttaaatggcaaccgtccgcaagttctatatgcagcttctgctgcacgtccttttggaattaactggcccggacggtttcgccactgataaacggcttcagttgttatgccgaaaaaagcagcaactttctcaatactgccgaagtagctttcgatatcgtcagttgtcatacgccctccaaactaagttttgttagatgctaattacaaatctatctttggtcaataaaaactaagattacttagcaattaaagaaatggtgctcctatggaaacggttggtcagcgtataaaagctctgagaagagttaccagaacgtcccagaaagaattgggtaaattttgtggagtaagcgacgttgctgtggggtactgggagaaagacatcaatacccctggcggggaggcactttcgaaattagcgaagttcttcaatacgtcaatagattacattctttatggtgctgagtttgaaggcaaactcgtcacaaacatgcgcagagttcctgtaatatcgtgggttcaggctgggcagtttactgagtgcagggcagcagaagtgtttagtgaagtggacaagtgggtagatacatcattaaaggttggtgataactcatttgcattagaggttaaaggtgactccatgactaaccctaatggcctcccaacaataccagaaggcgcaacagtgattgtagatccagatgcagaacctcgtcatggaaaaatagtcatcgctcgacttgatggaacaaacgaagctacagtaaaaaaattagtcatcgatggccctcaaaagtttttagtgccattaaatcctcggtatcccaacatccctatcaatggtaattgccttatcattggtgtagtcaaaggagttcaatacgaactctaagatctctcttctctaactaaggcaccgaactaagaaaagtttggtgttttctcttgccatgataactaagttaagttagattttatatcaaagataacgaacaggcaggacgcccacgaagtagccgcctggggcatatgaagtccaggatgattcgttagcaacaaaaaagcgccctataggacgcttcgctctttaacaatctggatgacttattactcagatttgaactttggttctggcaaaagaggaggagttgagtcctcgagatcgtagccagtgctcccagatatcgtgggattgtaattccagaagaccaatttgacgtgatgcaactgcagtgccagctatagttcctcctacataatcaacctggacggactttgacgctttctcaattaattctgtccaagcttcactttccgcgttaaaagaagcagttaattcctgcagacgctgtggatcatccttgttgtcttgtttcaaacgattcagggcggccaccgaatacttattcttaacccaactaacctgagctaactgaactctctgacaagcgtccatatcagtagttgtttcctgaggcatatcaaagcaggaaataaaaaaagtctcaacaccatcatttagactactgctcggctggttcaaagcatcagaagcattggatgctatcggtattatcagtgctaccgacagaatcaaacgtttaacataaatcgctcccatttaattatcccctctaagaacagagtcatccagattagccgaatccttgttgttggggaataaccaggcccacctcgcctgatgtggctaaaagcaggcacataacagctaagtattttcaaccagagagaatccttagcgttgtggtgaatgcggctcagcgcacgcgggttaaggttgaggctgacagtcgaccttctgtggatacccacccgcctggtgtgcaaccttcgccaggcaccgggaggccccggcaccacaactttatgctgtgtgtagtcctggcggtaccagcttgtacccttgcttccggctggtaccgctctttttacaaaacagagaagagcatcaccggacgacgggctcataacccaatccacccgggcggctgccaccgcaggtgttcttctctgttttgtggagaaaccaaccgaccttgcagggtcgata

SEQ ID NO: 421 - DNA, 675 bp, Escherichia coli; identical to SEQ ID NO: 154

SEQ ID NO: 422 - DNA, 675 bp, Escherichia coli; identical to SEQ ID NO: 154

SEQ ID NO: 423 - DNA, 675 bp, Escherichia coli; identical to SEQ ID NO: 154

SEQ ID NO: 424 - DNA, 675 bp, Escherichia coli; identical to SEQ ID NO: 154

SEQ ID NO: 425 - DNA, 198 bp, Escherichia coli
atgacaactgacgatatcgaaagctacttcggcagtattgagaaagttgctgcttttttcggcataacaactgaagccgtttatcagtggcgaaaccgtccgggccagttaattccaaaaggacgtgcagcagaagctgcatatagaacttgcggacggttgccatttaaacctgagctttatgaaaaatctaatgga

SEQ ID NO: 426 - protein, 66 aa, Escherichia coli
MTTDDIESYFGSIEKVAAFFGITTEAVYQWRNRPGQLIPKGRAAEAAYRTCGRLPFKPELYEKSNG

SEQ ID NO: 427 - DNA, 624 bp, Escherichia coli
atggaaacggttggtcagcgtataaaagctctgagaagagttaccagaacgtcccagaaagaattgggtaaattttgtggagtaagcgacgttgctgtggggtactgggagaaagacatcaatacccctggcggggaggcactttcgaaattagcgaagttcttcaatacgtcaatagattacattctttatggtgctgagtttgaaggcaaactcgtcacaaacatgcgcagagttcctgtaatatcgtgggttcaggctgggcagtttactgagtgcagggcagcagaagtgtttagtgaagtggacaagtgggtagatacatcattaaaggttggtgataactcatttgcattagaggttaaaggtgactccatgactaaccctaatggcctcccaacaataccagaaggcgcaacagtgattgtagatccagatgcagaacctcgtcatggaaaaatagtcatcgctcgacttgatggaacaaacgaagctacagtaaaaaaattagtcatcgatggccctcaaaagtttttagtgccattaaatcctcggtatcccaacatccctatcaatggtaattgccttatcattggtgtagtcaaaggagttcaatacgaactc

SEQ ID NO: 428 - protein, 208 aa, Escherichia coli
METVGQRIKALRRVTRTSQKELGKFCGVSDVAVGYWEKDINTPGGEALSKLAKFFNTSIDYILYGAEFEGKLVTNMRRVPVISWVQAGQFTECRAAEVFSEVDKWVDTSLKVGDNSFALEVKGDSMTNPNGLPTIPEGATVIVDPDAEPRHGKIVIARLDGTNEATVKKLVIDGPQKFLVPLNPRYPNIPINGNCLIIGVVKGVQYEL

SEQ ID NO: 429 - DNA, 507 bp, Escherichia coli
atgggagcgatttatgttaaacgtttgattctgtcggtagcactgataataccgatagcatccaatgcttctgatgctttgaaccagccgagcagtagtctaaatgatggtgttgagactttttttatttcctgctttgatatgcctcaggaaacaactactgatatggacgcttgtcagagagttcagttagctcaggttagttgggttaagaataagtattcggtggccgccctgaatcgtttgaaacaagacaacaaggatgatccacagcgtctgcaggaattaactgcttcttttaacgcggaaagtgaagcttggacagaattaattgagaaagcgtcaaagtccgtccaggttgattatgtaggaggaactatagctggcactgcagttgcatcacgtcaaattggtcttctggaattacaatcccacgatatctgggagcactggctacgatctcgaggactcaactcctcctcttttgccagaaccaaagttcaaatc

SEQ ID NO: 430 - protein, 169 aa, Escherichia coli
MGAIYVKRLILSVALIIPIASNASDALNQPSSSLNDGVETFFISCFDMPQETTTDMDACQRVQLAQVSWVKNKYSVAALNRLKQDNKDDPQRLQELTASFNAESEAWTELIEKASKSVQVDYVGGTIAGTAVASRQIGLLELQSHDIWEHWLRSRGLNSSSFARTKVQI

SEQ ID NO: 431 - DNA, 4586 bp, Escherichia coli
agagttaactgagtcgtaaaaatcagcacgtacgaattcaaactctgccataaaagaacatataagtaatttattaacatatagatataggttatattacaaattgaaaaattattggagagcaacaatgaatcaaaatccattctcattctatgactttcttggatatttaataccaggtggtttttttatcctattaatgtatttctgtggtttgacattcgatctagatattgttattgacttaagtgaattgctcagaggtcaaagtcaaatctttggcattttgaactacgcttcaatagttattatatcttatatagctggacattttatttctatcacatcagcattttttatcgaaaaatacatgaataaagaattaggatatccttccaaatatctatttaaaaaattgatagatacctcagaaagcatttgtagcccatcatgcgatgagagaagcgctgataaaaaaacaaaaataaagaatcgcataatcaaatgcgtattatgtccaataatactatgggattttataacacaaaaactatgttattctcaatctctaccatttcatttagctaatacaacatggttaatgatcaaagaaggttatgagaaaaagttcataacaaatcgccaattattacaagataaaaacggacttgatgatgatctcttcagattggcatatcattatgtttatgagttttcaaaacaacatcaaacaaaaattcaaaactatgttgcattatatggtttttgcagaaacatatgtttaatctttataatttcattttgggtatcagttccaacctttatttatcgattatgtactcatagtgattatctttatagtttactttcaataatgcttagctttttcttcgtctatgttttctatgttggttttgttaaattttatagaagatatactttagaagtattaatggcatttgctgtacttcaaagtaacgacactattcgttaataatgttgctcccgtgtgcagacgggataatggagaaacgtatgctgaacctcgattgtgttcctatctcaacttattgcaaagaaactggcgaaactcctgaagcaataaacaaacgtgtacagcgcggtgtttggcgtgaaggtgttcaggttttaaaggttgaaggcgttaaggagaggtggattgatcttagtgaggttgcaaaatgggccagacaaaactgctcaaactaccgcgcggcgtaacaatcaggaaacaccaccagggagaaacgatcaatataactttcacctacaaaggagttagatgtcgtgagccgctttccaatctggaagtaacaccaaagaacattaaatacgccgagcgtacactcggcgaaatccataataagatcgaaaggggaacattcatttatgcagaatattttccccgttctgctcgtttgaaaatttttggtaatgctgctgcaagcaaaacggtaaagatgtacctagacgaatatcttgaaatctgcgaaacaagaaaactttcaccctctacgattggtggctataaaaaatgccgtagtgcgttagcctcacttcacatttgccctgcaagtgaattaacaccagcaaccctgaaagcgtggattcaaagccagaaaacaaccttaaaaaccattcgcaaccagttatctttcctacggtcagcacttgatgaagccgtgaccgatggggtacttcaaattaaccccgtatcgttagtaacagcttcgcgctaccaaagtgataagtcagaagcagaaagcagctatgtggttgatccgctatcaccagcagaagttgatgcattactagcagcagccggaaacaaacaatgggaaaatctgttccggttcgccatacatacaggcctgcgtagttctgaattatgtgccctacgatggcatgatatcgactttgttggaaaaacagcccatgttcagagcgcaagtgttgtcggagttatcaaaggaacaaagacaaaagccggtacccgtaaagttgaactgactgaagaagcaatgttggcgttgataaaccagaagccatttacattcatgaaggatgctactgtctttgaagatccaaagaccaataaaccctggacaagtgctgatgcaatcaggaaaaaagcatgggtgccaacattgcgaaaagcaggtattcgttacagaaatccatatcaaactaggcatacattcgccacccgccatatcagccggggagcaaacctgttttggcttgcagctcaaatggggcataaagggccggaaatgttatttcgtcattatggttcatatttaaaggaatatgacggtaatacgaccagcaatatcacaaaaaaagccacttaagtggctttatcaattaggaggctctcgatttaagcatttccgtacacttagcaaagagcctctcagttgttagaatcgcaacttcagactgtttagaagtgaccgattgatcaagtcgatagtctgcaacaatcctctgagctttaagttgactcaggataaaactaatcccttttagatatctagcttcatatacttcacttcctcttgaagcatcaccctgcaaataattgattagcccctgatgactgtctttcggcccgtttaccatacaaggcaagacatgatggtaagcgccatagtaggatcttgctatagcatttcgatagccgatttcgtcattacgttgatgacagtcttttgcaaaaccgagaaaatcttgactattaaccggcatgtgcaaccctccgggtaatcagacctaattcggagatagcattctgctcaatatgagtgtctttacattcaaaccaaacagtaaaatctttaccgactaaacaatcgtgctcagccattgaaaaagcaagctcaatattcatatcagcgatttgttcagcatcagaagactttgtcatgaatacaatcgcattcactttctcttccgaaatattataaaaacgcattcccgaaagatgaaccttctgagaatccatgacattggctacattattgaaaataagttcatattctaaaccagaaagatcggcacgttgcttaaaggattcgacctgggaaacaacttcatcaaaattgttgtccattttttcaggctccttatctccgaacaatttagagtatgactggaaatacttctccgccaacgccattttccccataaagagggagttttcataagcttgaagataaataaacggggatacgaagctttcagcaagcttaatgcttgtttcaaagcttttcttcaacgtaccgtaatctgacaagaaaacaagaaaattctttgcaacaaccttattatggcatacctgcaaggaacgctcaaagaagcctatcgcctcattcacttgaccatgtgcaccataggaccaaacgctaaaagatagtcctcagagacaggatctctaagtgcttcaatctcacgtaacatccttctaaagttaaagtcatcaatcctcactccatcttttgaggtatttagttagccccgcgctaataactgatgcttttttttgctggctgcaacattaaaaaccttatcttacaaattagttggtaatgatgttgaattattttttgttcttttatgggctaataagattacattgaagggacaactttcttggccaccttagaaaacactcacctttaagtaacaagagtcaataatattgttgacaaatcacaaaaaaacaaacttatccaaaacaatctggtttattacaaagcctctgtgcataaatctgtgtataacatcatttttacacacatttttataaaaatattttttagcaaaaaatgctatctatctccgaaactgcaaccacaaaccattaattccaaatgaaactattttaaaataaatagtaagacagtaacaggacggaaaaagttccgcaaaagagccgcgtgtaaaatcaacaatatttggctatttaaattcaatgaattacataactatggacacgggttcaactcccgccagctccaccaatcatgattggacggtgtaaggactacaccaacaaaaacaggaagttataagtctcagcaggacaccgaccagacggtgaggagacaaaaaaggatacgcaacggagtcgcgactccctatgacattaaagcccgctgatgcgggcttttttattggtcctgacccgccctgaatagaattcatccaattacagtccagacatatacagtatccctcagctcagtatcagcttctcgacaaatggtcactgttatttacccgttgccagaaagagaataatttgcccccatagccagccttcctggaatctgtatattcattaatattgttatcgattccatcaagtaacataggttggatgcgattgatcttactcacattagtcgacacggaactcagtaagttgaactctgaaaaagcagtttaaatagcatttaaacaaatgccaccagttcgaaaaagagtataagcacacttaatatattgttttaattattcatttcctttcaacccaattcttatccctcacattatttgtt

SEQ ID NO: 432 - DNA, 888 bp, Escherichia coli
ttgaaaaattattggagagcaacaatgaatcaaaatccattctcattctatgactttcttggatatttaataccaggtggtttttttatcctattaatgtatttctgtggtttgacattcgatctagatattgttattgacttaagtgaattgctcagaggtcaaagtcaaatctttggcattttgaactacgcttcaatagttattatatcttatatagctggacattttatttctatcacatcagcattttttatcgaaaaatacatgaataaagaattaggatatccttccaaatatctatttaaaaaattgatagatacctcagaaagcatttgtagcccatcatgcgatgagagaagcgctgataaaaaaacaaaaataaagaatcgcataatcaaatgcgtattatgtccaataatactatgggattttataacacaaaaactatgttattctcaatctctaccatttcatttagctaatacaacatggttaatgatcaaagaaggttatgagaaaaagttcataacaaatcgccaattattacaagataaaaacggacttgatgatgatctcttcagattggcatatcattatgtttatgagttttcaaaacaacatcaaacaaaaattcaaaactatgttgcattatatggtttttgcagaaacatatgtttaatctttataatttcattttgggtatcagttccaacctttatttatcgattatgtactcatagtgattatctttatagtttactttcaataatgcttagctttttcttcgtctatgttttctatgttggttttgttaaattttatagaagatatactttagaagtattaatggcatttgctgtacttcaaagtaacgacactattcgt

SEQ ID NO: 433 - protein, 296 aa, Escherichia coli
LKNYWRATMNQNPFSFYDFLGYLIPGGFFILLMYFCGLTFDLDIVIDLSELLRGQSQIFGILNYASIVIISYIAGHFISITSAFFIEKYMNKELGYPSKYLFKKLIDTSESICSPSCDERSADKKTKIKNRIIKCVLCPIILWDFITQKLCYSQSLPFHLANTTWLMIKEGYEKKFITNRQLLQDKNGLDDDLFRLAYHYVYEFSKQHQTKIQNYVALYGFCRNICLIFIISFWVSVPTFIYRLCTHSDYLYSLLSIMLSFFFVYVFYVGFVKFYRRYTLEVLMAFAVLQSNDTIR

SEQ ID NO: 434 - DNA, 1170 bp, Escherichia coli
atgggccagacaaaactgctcaaactaccgcgcggcgtaacaatcaggaaacaccaccagggagaaacgatcaatataactttcacctacaaaggagttagatgtcgtgagccgctttccaatctggaagtaacaccaaagaacattaaatacgccgagcgtacactcggcgaaatccataataagatcgaaaggggaacattcatttatgcagaatattttccccgttctgctcgtttgaaaatttttggtaatgctgctgcaagcaaaacggtaaagatgtacctagacgaatatcttgaaatctgcgaaacaagaaaactttcaccctctacgattggtggctataaaaaatgccgtagtgcgttagcctcacttcacatttgccctgcaagtgaattaacaccagcaaccctgaaagcgtggattcaaagccagaaaacaaccttaaaaaccattcgcaaccagttatctttcctacggtcagcacttgatgaagccgtgaccgatggggtacttcaaattaaccccgtatcgttagtaacagcttcgcgctaccaaagtgataagtcagaagcagaaagcagctatgtggttgatccgctatcaccagcagaagttgatgcattactagcagcagccggaaacaaacaatgggaaaatctgttccggttcgccatacatacaggcctgcgtagttctgaattatgtgccctacgatggcatgatatcgactttgttggaaaaacagcccatgttcagagcgcaagtgttgtcggagttatcaaaggaacaaagacaaaagccggtacccgtaaagttgaactgactgaagaagcaatgttggcgttgataaaccagaagccatttacattcatgaaggatgctactgtctttgaagatccaaagaccaataaaccctggacaagtgctgatgcaatcaggaaaaaagcatgggtgccaacattgcgaaaagcaggtattcgttacagaaatccatatcaaactaggcatacattcgccacccgccatatcagccggggagcaaacctgttttggcttgcagctcaaatggggcataaagggccggaaatgttatttcgtcattatggttcatatttaaaggaatatgacggtaatacgaccagcaatatcacaaaaaaagccact

SEQ ID NO: 435 - protein, 390 aa, Escherichia coli
MGQTKLLKLPRGVTIRKHHQGETINITFTYKGVRCREPLSNLEVTPKNIKYAERTLGEIHNKIERGTFIYAEYFPRSARLKIFGNAAASKTVKMYLDEYLEICETRKLSPSTIGGYKKCRSALASLHICPASELTPATLKAWIQSQKTTLKTIRNQLSFLRSALDEAVTDGVLQINPVSLVTASRYQSDKSEAESSYVVDPLSPAEVDALLAAAGNKQWENLFRFAIHTGLRSSELCALRWHDIDFVGKTAHVQSASVVGVIKGTKTKAGTRKVELTEEAMLALINQKPFTFMKDATVFEDPKTNKPWTSADAIRKKAWVPTLRKAGIRYRNPYQTRHTFATRHISRGANLFWLAAQMGHKGPEMLFRHYGSYLKEYDGNTTSNITKKAT

SEQ ID NO: 436 - DNA, 381 bp, Escherichia coli
atgccggttaatagtcaagattttctcggttttgcaaaagactgtcatcaacgtaatgacgaaatcggctatcgaaatgctatagcaagatcctactatggcgcttaccatcatgtcttgccttgtatggtaaacgggccgaaagacagtcatcaggggctaatcaattatttgcagggtgatgcttcaagaggaagtgaagtatatgaagctagatatctaaaagggattagttttatcctgagtcaacttaaagctcagaggattgttgcagactatcgacttgatcaatcggtcacttctaaacagtctgaagttgcgattctaacaactgagaggctctttgctaagtgtacggaaatgcttaaatcgagagcctcc

SEQ ID NO: 437 - protein, 127 aa, Escherichia coli
MPVNSQDFLGFAKDCHQRNDEIGYRNAIARSYYGAYHHVLPCMVNGPKDSHQGLINYLQGDASRGSEVYEARYLKGISFILSQLKAQRIVADYRLDQSVTSKQSEVAILTTERLFAKCTEMLKSRAS

SEQ ID NO: 438 - DNA, 636 bp, Escherichia coli
gtgaatgaggcgataggcttctttgagcgttccttgcaggtatgccataataaggttgttgcaaagaattttcttgttttcttgtcagattacggtacgttgaagaaaagctttgaaacaagcattaagcttgctgaaagcttcgtatccccgtttatttatcttcaagcttatgaaaactccctctttatggggaaaatggcgttggcggagaagtatttccagtcatactctaaattgttcggagataaggagcctgaaaaaatggacaacaattttgatgaagttgtttcccaggtcgaatcctttaagcaacgtgccgatctttctggtttagaatatgaacttattttcaataatgtagccaatgtcatggattctcagaaggttcatctttcgggaatgcgtttttataatatttcggaagagaaagtgaatgcgattgtattcatgacaaagtcttctgatgctgaacaaatcgctgatatgaatattgagcttgctttttcaatggctgagcacgattgtttagtcggtaaagattttactgtttggtttgaatgtaaagacactcatattgagcagaatgctatctccgaattaggtctgattacccggagggttgcacatgccggt

SEQ ID NO: 439 - protein, 212 aa, Escherichia coli
VNEAIGFFERSLQVCHNKVVAKNFLVFLSDYGTLKKSFETSIKLAESFVSPFIYLQAYENSLFMGKMALAEKYFQSYSKLFGDKEPEKMDNNFDEVVSQVESFKQRADLSGLEYELIFNNVANVMDSQKVHLSGMRFYNISEEKVNAIVFMTKSSDAEQIADMNIELAFSMAEHDCLVGKDFTVWFECKDTHIEQNAISELGLITRRVAHAG

SEQ ID NO: 440 - DNA, 195 bp, Escherichia coli
ctggactgtaattggatgaattctattcagggcgggtcaggaccaataaaaaagcccgcatcagcgggctttaatgtcatagggagtcgcgactccgttgcgtatccttttttgtctcctcaccgtctggtcggtgtcctgctgagacttataacttcctgtttttgttggtgtagtccttacaccgtccaatca

SEQ ID NO: 441 - protein, 65 aa, Escherichia coli
LDCNWMNSIQGGSGPIKKPASAGFNVIGSRDSVAYPFLSPHRLVGVLLRLITSCFCWCSPYTVQS

SEQ ID NO: 442 - DNA, 171 bp, Escherichia coli
ctgagttccgtgtcgactaatgtgagtaagatcaatcgcatccaacctatgttacttgatggaatcgataacaatattaatgaatatacagattccaggaaggctggctatgggggcaaattattctctttctggcaacgggtaaataacagtgaccatttgtcgagaagc

SEQ ID NO: 443 - protein, 57 aa, Escherichia coli
LSSVSTNVSKINRIQPMLLDGIDNNINEYTDSRKAGYGGKLFSFWQRVNNSDHLSRS

SEQ ID NO: 444 - DNA, 1952 bp, Escherichia coli
tgggaattttagattgattacgccaccatgaatggctcaacggggtaggggattttgtgttttttgccggcaaatacccggcatcaagaagttacatccgcatgaaacggccagacggttaaaacaattcatcagcccgatggcaaacgttaagtcgctgatctctgctgcgctgaaatgctcaagcaaaggctgataaacctcgtcttccgcatgggttctggcaatttcggttaccgattccgcccatgccagcgccgcccgctcgcgttcatcaaaatgatggcttacgcgccaacctgccagggcgtccagtttgtgctgtggcacgccggatttgcgcaatgctttgctgtgcatctccagacaaaatgcgcagccgttgatttgcgagacgcgcaaataaactaactccatcaacgtggtatccagcgtgctattttccagtgccgttttggcctgcactagtgcgttatacactgccgggctaagttcgtagtaaggctgacgtaatgtagtcatacagtttctcctcttattaacgcccgcaatgtagcactataatggactgctaaagagagccataaattacctaaaaaagcagaccatatgccgcgctatcaggatatcgcccgtcagttaaaaacggctattgagcaaggggaactgaaacccggcagcaaggcctgccttcaagtcgtacctggtcgcaggagcctgggggtgtctcgatccactgtcgaaaatgcgtatgctgagctggtggcgcaaggatggctgatcaggctggggacaggctggcacatttgtcagtgagcggatatatccgaacaatctactgtacaagttgtagattttgccggtgaaagtcagcaaccgttgccatttcaaatgggattacccgcactcgatctctttccgcgagagctgtgggctgcgggtgatggggcgtcgccttcgtacccagacgcgctttgatttggcgttaggcgatgtttgcggtgaggtggcgttgcgcgaggcaatagttgattacttacgcatttcacgtgggattgattgtcagccagagcaggtctttatcactcacggttatgcggcctcaatagctttaattctgcacgcgctggcgaaaccgggaaacgggatgtggatagaagatcccggctttccactgattcgcccgattgtcactcgccatgatgtggaaattttgcctgtgccggttgatgacaatggactggatatcacaagcggaatacaaaattatcctgatgcgcgttttgccctgataacaccagcacaccaaagtccgctgggtgtggcgctctctttagcgcgcaggcatcagatactggaatgggcagatcgtagtcaggcatggattattgaagatgattatgacagtgagtttcgctatcacggtaagccgttaccggcgttaaaaagtctcgacgcaccgcagcgggtaatttatgccggaacattcagcaaagcgctatttcctgcattgcgctgtgcgtggctggtggtgccggtgaagcaaattgcacaattccgccaccaggcgtcactggctccatgtgcggtacctgttctatggcagaacacactggcagactttcttcgcgaggggcatttctggcggcatctgaagaaaatgcgtcagcattatgctcaacgtcggcaatggattgagcaagcgttgacgcagcaaggatttcaggttgtgccgcagaaaggtggtatccagatggtgatcagaatgataggcgatgatattgcccatgcgcgtaaagccaatgctgcaggccttgcggtgcaggcacttagcgactggcgtatccgttcaagtggggaaggtggattactgctttcgtttactaatattgttaacgaaggtatggcgcgacaggtagcacaacaattacgtaaagccttaagctaaaaaa

SEQ ID NO: 445 - DNA, 483 bp, Escherichia coli
atgactacattacgtcagccttactacgaacttagcccggcagtgtataacgcactagtgcaggccaaaacggcactggaaaatagcacgctggataccacgttgatggagttagtttatttgcgcgtctcgcaaatcaacggctgcgcattttgtctggagatgcacagcaaagcattgcgcaaatccggcgtgccacagcacaaactggacgccctggcaggttggcgcgtaagccatcattttgatgaacgcgagcgggcggcgctggcatgggcggaatcggtaaccgaaattgccagaacccatgcggaagacgaggtttatcagcctttgcttgagcatttcagcgcagcagagatcagcgacttaacgtttgccatcgggctgatgaattgttttaaccgtctggccgtttcatgcggatgtaacttcttgatgccgggtatttgccggcaaaaaacacaaaatcccctaccccgt

SEQ ID NO: 446 - protein, 161 aa, Escherichia coli
MTTLRQPYYELSPAVYNALVQAKTALENSTLDTTLMELVYLRVSQINGCAFCLEMHSKALRKSGVPQHKLDALAGWRVSHHFDERERAALAWAESVTEIARTHAEDEVYQPLLEHFSAAEISDLTFAIGLMNCFNRLAVSCGCNFLMPGICRQKTQNPLPR

SEQ ID NO: 447 - DNA, 1332 bp, Escherichia coli
atgccgcgctatcaggatatcgcccgtcagttaaaaacggctattgagcaaggggaactgaaacccggcagcaaggcctgccttcaagtcgtacctggtcgcaggagcctgggggtgtctcgatccactgtcgaaaatgcgtatgctgagctggtggcgcaaggatggctgatcaggctggggacaggctggcacatttgtcaggcggatatatccgaacaatctactgtacaagttgtagattttgccggtgaaagtcagcaaccgttgccatttcaaatgggattacccgcactcgatctctttccgcgagagctgtgggctcgggtgatggggcgtcgccttcgtacccagacgcgctttgatttggcgttaggcgatgtttgcggtgaggtggcgttgcgcgaggcaatagttgattacttacgcatttcacgtgggattgattgtcagccagagcaggtctttatcactcacggttatgcggcctcaatagctttaattctgcacgcgctggcgaaaccgggaaacgggatgtggatagaagatcccggctttccactgattcgcccgattgtcactcgccatgatgtggaaattttgcctgtgccggttgatgacaatggactggatatcacaagcggaatacaaaattatcctgatgcgcgttttgccctgataacaccagcacaccaaagtccgctgggtgtggcgctctctttagcgcgcaggcatcagatactggaatgggcagatcgtagtcaggcatggattattgaagatgattatgacagtgagtttcgctatcacggtaagccgttaccggcgttaaaaagtctcgacgcaccgcagcgggtaatttatgccggaacattcagcaaagcgctatttcctgcattgcgctgtgcgtggctggtggtgccggtgaagcaaattgcacaattccgccaccaggcgtcactggctccatgtgcggtacctgttctatggcagaacacactggcagactttcttcgcgaggggcatttctggcggcatctgaagaaaatgcgtcagcattatgctcaacgtcggcaatggattgagcaagcgttgacgcagcaaggatttcaggttgtgccgcagaaaggtggtatccagatggtgatcagaatgataggcgatgatattgcccatgcgcgtaaagccaatgctgcaggccttgcggtgcaggcacttagcgactggcgtatccgttcaagtggggaaggtggattactgctttcgtttactaatattgttaacgaaggtatggcgcgacaggtagcacaacaattacgtaaagccttaagc

SEQ ID NO: 448 - protein, 444 aa, Escherichia coli
MPRYQDIARQLKTAIEQGELKPGSKACLQVVPGRRSLGVSRSTVENAYAELVAQGWLIRLGTGWHICQADISEQSTVQVVDFAGESQQPLPFQMGLPALDLFPRELWARVMGRRLRTQTRFDLALGDVCGEVALREAIVDYLRISRGIDCQPEQVFITHGYAASIALILHALAKPGNGMWIEDPGFPLIRPIVTRHDVEILPVPVDDNGLDITSGIQNYPDARFALITPAHQSPLGVALSLARRHQILEWADRSQAWIIEDDYDSEFRYHGKPLPALKSLDAPQRVIYAGTFSKALFPALRCAWLVVPVKQIAQFRHQASLAPCAVPVLWQNTLADFLREGHFWRHLKKMRQHYAQRRQWIEQALTQQGFQVVPQKGGIQMVIRMIGDDIAHARKANAAGLAVQALSDWRIRSSGEGGLLLSFTNIVNEGMARQVAQQLRKALS

SEQ ID NO: 449 - DNA, 2980 bp, Escherichia coli
gatgcaaaaattggctcagatcattaagaataaaatgaagcggcgtattatgttttcaaggattaaatgaaagggatttaaacatgtttagaatattcatcgcgtttatatttattttcaatttatcaggttgcggttataacgatattcaaacctatgatgaacaggttaatgcctcctggtcagaagtattaaatcaatatcaacgtcgcaccgatcttattcctaatcttgtcgctagtattaaaggttactccagccatgaacaagaggtactagaagccgtaacattggcacgtagtcaggctaatcgcgccagtagcgatcttcagaaaactccgggagatgaacaaaaattacaagcctggcaacaggcgcaggcgcaggtgactcgcactctcgggcagttaacgattattagtgagcgttaccctcagttaaaggctcaagagctctatcaaaacttaatggtacagctcgaaggaagtgaaaatagaattgccgttgcgcgaggaagatatattaaagccattgaacaatataatgtcactatccgcaaattccccgctgtattaaccgcaaaggtcatggattacacaccaaagaaaaattatttgccggatgatgtcaccgcagtaagtaaagccccaacaatagattttagccagaatgctaatgctcattaagcggggacgttctatgcgaaattttatcttccttatagctttcttctgttcatctgtgtttgctacacaaattccagtacctgaatcacccaggtatgtgaatgacttaaccggcacattaacaaacagcgaagtaaacaccctgaccaaccagattaaagccctgacgcaaaaaaaacacgcacagttggtcgtgttagtggttgatacaacaggcgatgaaaccatcgagcagtacgcaacgcgggtattcgatagctggaaaccgggtgataaagaccgtgatgatggcgttctactgttagtcgcctggcaggatcataccgtgcgtattgaaatcggttacgggctggaaggtattattacggatgcacagtccgggaaaattattcgcaacagtattattccggcatttaaaaaaggcgacctggctggtggtttacaaaaggggatcaacgatattgaaagtcgcctgacggggaataattcagcaacgataacaccgaccgatcaccctttgccctttagcggttggtgggctttattagtctgggcgataatactgacgtttatttctgccagaggatatatcaaaacgttgggagtaatttgcttcgcagccattgtactggcctttgttttacctatagcaggtttcagcggaagctggggagtactcacaacattactctgcttcgccacaccgtttctggcagttgccatcgcttttacccccttcggcaaaaaggttcgggattcgatgcgtgatgccaaccagccatcacgccatacaagaagcaattcttcctcccactattcatcatcgtcatcctcttcattcgacaatgacaattttagcggtggtggcggttcatctggtggcggtggcgcttccgggcgctggtaacaaaaggaattgatatgcgtatttttctcttacttctgatgctatgcggttttcaggtattcgctgaacgattgccttcagtgactgacttaaccgggacattaacgacagaagaacaaagtgctttaaatcaacaattacagactctcgagcagcaaaaccacttccaggtggccgtgttggttacgccgacaacagggggcaaaaacattaaacttgcagcctcgcagagatacggggtatatcactggaaacccgttggagagaagcgatatggcgaaggtatcttaattctcgtcgtttggccggaagggctggcgtcaatgaagattggacatggactggaacagatgttgccgccggaacaagctgcgcaaattgttcgttaccatatgcagccagaattcgaaaaaaacaatctctttgctggattaacgggcggaattgaaagcatcgcacagtttacccatatcaaagcgaaccttagccctttggatgctttagccaatcatctgtttgctaatccgcaactttcgctgccatgccttgcctggacagtgctgatgatcgttgccatcattgtcctctggcgatttaccagccgtccaggacctggcatatggatgatatcaatgattacacctacggtctggtttttctgctttcaggacgatgtcatcattcggcgggtgtcggtcgtttgttttagtttatttttcgcagcaatctgctggcagcgtctcgcagtagtttttaatatgtgccgcgtatttcctatgatgctggccccaaaaaataaaaacgctaaagtgaaaaaacaaaagaagactccgcaatttcgtgaatcaggacgaaattcattgtttgtcgtgatgctgataattattgtgggatggtgcctggtgttcgccagtaataaagatattgcattcatctcaacaattattgggttaattgatcattttatcggcccaataaccattgctggcatcgttctgctgatcattgtggccaaatttactggcaatcttaagctggggtcaggagaaaaaagcaacaggaaaacggggaatcgtaatgctcatgctcattctcgctcttcgtcgagaaattctttccgcggtggtggcggttcttcaggaggcggcggttcatccggccgttggtgatcgtaatgcgcttaatctttattctattcactttgtggtgccttcctgggcttgcccagcaaattgctgtgccggaactgcgccaacaggtgaccgatattactggtacgttaagcacttctgaacaacaatcactgacacagcaactgcaggatattacacataaaacacgggcgcaggtcgctgtattagtagtgccgtccatcggagacgattcc

SEQ ID NO: 450 - DNA, 600 bp, Escherichia coli
atgtttagaatattcatcgcgtttatatttattttcaatttatcaggttgcggttataacgatattcaaacctatgatgaacaggttaatgcctcctggtcagaagtattaaatcaatatcaacgtcgcaccgatcttattcctaatcttgtcgctagtattaaaggttactccagccatgaacaagaggtactagaagccgtaacattggcacgtagtcaggctaatcgcgccagtagcgatcttcagaaaactccgggagatgaacaaaaattacaagcctggcaacaggcgcaggcgcaggtgactcgcactctcgggcagttaacgattattagtgagcgttaccctcagttaaaggctcaagagctctatcaaaacttaatggtacagctcgaaggaagtgaaaatagaattgccgttgcgcgaggaagatatattaaagccattgaacaatataatgtcactatccgcaaattccccgctgtattaaccgcaaaggtcatggattacacaccaaagaaaaattatttgccggatgatgtcaccgcagtaagtaaagccccaacaatagattttagccagaatgctaatgctcat

SEQ ID NO: 451 - protein, 200 aa, Escherichia coli
MFRIFIAFIFIFNLSGCGYNDIQTYDEQVNASWSEVLNQYQRRTDLIPNLVASIKGYSSHEQEVLEAVTLARSQANRASSDLQKTPGDEQKLQAWQQAQAQVTRTLGQLTIISERYPQLKAQELYQNLMVQLEGSENRIAVARGRYIKAIEQYNVTIRKFPAVLTAKVMDYTPKKNYLPDDVTAVSKAPTIDFSQNANAH

SEQ ID NO: 452 - DNA, 891 bp, Escherichia coli
atgcgaaattttatcttccttatagctttcttctgttcatctgtgtttgctacacaaattccagtacctgaatcacccaggtatgtgaatgacttaaccggcacattaacaaacagcgaagtaaacaccctgaccaaccagattaaagccctgacgcaaaaaaaacacgcacagttggtcgtgttagtggttgatacaacaggcgatgaaaccatcgagcagtacgcaacgcgggtattcgatagctggaaaccgggtgataaagaccgtgatgatggcgttctactgttagtcgcctggcaggatcataccgtgcgtattgaaatcggttacgggctggaaggtattattacggatgcacagtccgggaaaattattcgcaacagtattattccggcatttaaaaaaggcgacctggctggtggtttacaaaaggggatcaacgatattgaaagtcgcctgacggggaataattcagcaacgataacaccgaccgatcaccctttgccctttagcggttggtgggctttattagtctgggcgataatactgacgtttatttctgccagaggatatatcaaaacgttgggagtaatttgcttcgcagccattgtactggcctttgttttacctatagcaggtttcagcggaagctggggagtactcacaacattactctgcttcgccacaccgtttctggcagttgccatcgcttttacccccttcggcaaaaaggttcgggattcgatgcgtgatgccaaccagccatcacgccatacaagaagcaattcttcctcccactattcatcatcgtcatcctcttcattcgacaatgacaattttagcggtggtggcggttcatctggtggcggtggcgcttccgggcgctgg

SEQ ID NO: 453 - protein, 307 aa, Escherichia coli
MLMLIKRGRSMRNFIFLIAFFCSSVFATQIPVPESPRYVNDLTGTLTNSEVNTLTNQIKALTQKKHAQLVVLVVDTTGDETIEQYATRVFDSWKPGDKDRDDGVLLLVAWQDHTVRIEIGYGLEGIITDAQSGKIIRNSIIPAFKKGDLAGGLQKGINDIESRLTGNNSATITPTDHPLPFSGWWALLVWAIILTFISARGYIKTLGVICFAAIVLAFVLPIAGFSGSWGVLTTLLCFATPFLAVAIAFTPFGKKVRDSMRDANQPSRHTRSNSSSHYSSSSSSSFDNDNFSGGGGSSGGGGASGRW

SEQ ID NO: 454 - DNA, 1152 bp, Escherichia coli
atgcgtatttttctcttacttctgatgctatgcggttttcaggtattcgctgaacgattgccttcagtgactgacttaaccgggacattaacgacagaagaacaaagtgctttaaatcaacaattacagactctcgagcagcaaaaccacttccaggtggccgtgttggttacgccgacaacagggggcaaaaacattaaacttgcagcctcgcagagatacggggtatatcactggaaacccgttggagagaagcgatatggcgaaggtatcttaattctcgtcgtttggccggaagggctggcgtcaatgaagattggacatggactggaacagatgttgccgccggaacaagctgcgcaaattgttcgttaccatatgcagccagaattcgaaaaaaacaatctctttgctggattaacgggcggaattgaaagcatcgcacagtttacccatatcaaagcgaaccttagccctttggatgctttagccaatcatctgtttgctaatccgcaactttcgctgccatgccttgcctggacagtgctgatgatcgttgccatcattgtcctctggcgatttaccagccgtccaggacctggcatatggatgatatcaatgattacacctacggtctggtttttctgctttcaggacgatgtcatcattcggcgggtgtcggtcgtttgttttagtttatttttcgcagcaatctgctggcagcgtctcgcagtagtttttaatatgtgccgcgtatttcctatgatgctggccccaaaaaataaaaacgctaaagtgaaaaaacaaaagaagactccgcaatttcgtgaatcaggacgaaattcattgtttgtcgtgatgctgataattattgtgggatggtgcctggtgttcgccagtaataaagatattgcattcatctcaacaattattgggttaattgatcattttatcggcccaataaccattgctggcatcgttctgctgatcattgtggccaaatttactggcaatcttaagctggggtcaggagaaaaaagcaacaggaaaacggggaatcgtaatgctcatgctcattctcgctcttcgtcgagaaattctttccgcggtggtggcggttcttcaggaggcggcggttcatccggccgttgg

SEQ ID NO: 455 - protein, 384 aa, Escherichia coli
MRIFLLLLMLCGFQVFAERLPSVTDLTGTLTTEEQSALNQQLQTLEQQNHFQVAVLVTPTTGGKNIKLAASQRYGVYHWKPVGEKRYGEGILILVVWPEGLASMKIGHGLEQMLPPEQAAQIVRYHMQPEFEKNNLFAGLTGGIESIAQFTHIKANLSPLDALANHLFANPQLSLPCLAWTVLMIVAIIVLWRFTSRPGPGIWMISMITPTVWFFCFQDDVIIRRVSVVCFSLFFAAICWQRLAVVFNMCRVFPMMLAPKNKNAKVKKQKKTPQFRESGRNSLFVVMLIIIVGWCLVFASNKDIAFISTIIGLIDHFIGPITIAGIVLLIIVAKFTGNLKLGSGEKSNRKTGNRNAHAHSRSSSRNSFRGGGGSSGGGGSSGRW

SEQ ID NO: 456 - DNA, 1035 bp, Escherichia coli
tgccgagtaagtgataacaccggggtatttgccccggtttttaatgtcataaataatggattattgaacatgataaaaattgatgaaatagattttttcgctttcgaaggatgttcagagtccgaagttactgaactattaggaaaaaaaccaacaggttataatgattggatgattaatataaaaacaggtgtggagtgggtattttatgatggtcgttattggttagattttcgtaaatccaaagagggtataaggtgtatctcatgcagtattctgtatcacgataaaagtaaagggcgtatcgatgtcttatttagtgaaggtatagctgacagaggtttaaaaaatacgggtggagtgttaatccaaaaacgcccgcaattataataattcctggtaatatttgttttcgtaaaaaggatttactttatgcaacgtcaatataaaaaatacattcttcttttttggggtgtcatggatgttatcgcgatagccacatatctgttctactcgcttggtaatggtcgtatccctttttattccgatatcgttcattcactttctttacttaaggatatcggtgttgaaggcggtttttacgcttatgcagtcgccactgttacgctacaaatagtattattgctctctttattcttttctgcgcaatgttttttaagacaaaaattatttagtttctcttttttggcgattcaggaagttatgcgttttgctaccgtaagctgctcaatctccgtaataccgttgttacttaattattttcattcacagaatctggtcttaaatatttcgttgtttatcttctcagaggtcacaaaagtgacaacgattatctggtgtaaacgacaggggaaagtgtgacagaaatagcaacagatacaggtggatttttatataaatgcctttttaaatgctttcttgtataaatctcttatactgaaagtacatacaagagaaatgcctggataaaaacaacgtgattagaaaaatcttaacaggaaaatgcataacaaa

SEQ ID NO: 457 - DNA, 324 bp, Escherichia coli
ttgaacatgataaaaattgatgaaatagattttttcgctttcgaaggatgttcagagtccgaagttactgaactattaggaaaaaaaccaacaggttataatgattggatgattaatataaaaacaggtgtggagtgggtattttatgatggtcgttattggttagattttcgtaaatccaaagagggtataaggtgtatctcatgcagtattctgtatcacgataaaagtaaagggcgtatcgatgtcttatttagtgaaggtatagctgacagaggtttaaaaaatacgggtggagtgttaatccaaaaacgcccgcaatta

SEQ ID NO: 458 - protein, 108 aa, Escherichia coli
LNMIKIDEIDFFAFEGCSESEVTELLGKKPTGYNDWMINIKTGVEWVFYDGRYWLDFRKSKEGIRCISCSILYHDKSKGRIDVLFSEGIADRGLKNTGGVLIQKRPQL

SEQ ID NO: 459 - DNA, 447 bp, Escherichia coli
atgcaacgtcaatataaaaaatacattcttcttttttggggtgtcatggatgttatcgcgatagccacatatctgttctactcgcttggtaatggtcgtatccctttttattccgatatcgttcattcactttctttacttaaggatatcggtgttgaaggcggtttttacgcttatgcagtcgccactgttacgctacaaatagtattattgctctctttattcttttctgcgcaatgttttttaagacaaaaattatttagtttctcttttttggcgattcaggaagttatgcgttttgctaccgtaagctgctcaatctccgtaataccgttgttacttaattattttcattcacagaatctggtcttaaatatttcgttgtttatcttctcagaggtcacaaaagtgacaacgattatctggtgtaaacgacaggggaaagtg

SEQ ID NO: 460 - protein, 161 aa, Escherichia coli
LVIFVFVKRIYFMQRQYKKYILLFWGVMDVIAIATYLFYSLGNGRIPFYSDIVHSLSLLKDIGVEGGFYAYAVATVTLQIVLLLSLFFSAQCFLRQKLFSFSFLAIQEVMRFATVSCSISVIPLLLNYFHSQNLVLNISLFIFSEVTKVTTIIWCKRQGKV

SEQ ID NO: 461 - DNA, 6317 bp, Escherichia coli
acaggcgctgagactgatgacaaacacaggattgcctgatgcgctacgcttacctggcctaccagataactgcaatatattgaattttcaagattatgtaggccgaataaggcttcattccgtatccggcataaacaatgtgtactttgccaccaatttgagcgccccttaaggcgctgatgtttttttattcttctcgtgcacattgtgccgcttcagcaatcagccgcacatcaggtcgcgaagttgccgcggcgaccagccagcgacatgcagagttaagtagcgcgattaatcatgggaaattgcctctgcatgggcgagcaggtattgctccgcctcaccggaccagatcccctgatgacgcgccagaatcgccgccagtgcttgatcctgaatctgcgtgagtgacgtcagcggcaggaatttcccggtatacaccagctttttgccgccgccgacggcaggcaattcaagcgtggtttcgcccgcggcattcagcccaagaatatgtgttaccacttttgcggcctgcacttttttctcttcaatcaatttgaccgctgcgcgcatgtcgtcgatattgccgcctgacgtgcccacgtagtgggtaaatgcataatgcacatcgtagaaattaattggcgcgctgaagtgcttatcctgcggtccggcgaagaaattcagacaaccatctgttgccagcaaggaagaggcgagagtcaccagtccttcattaggcacaaagacgaaaatatcatcgaagccgtgaccgccactcagtgccattaacgtatcaaatgctgcatcggcggcattgagataatgaatcagtgtttgcggttctgatggatagtgcttgcgtgcataactcaatttgtcgttgtcggtatcggtaatgacgagcagcgacgggttaaccggtccatgcaacgcataatcaatcgccagcagccccatcgggccggtgccgccgaggatcagcgtgcgcccttgcgggcgaatccccatcgtgtggttataactaccttcctgaagatgatagttggcgttgaacgcgccaatcacgcaggaaagcggttcaaccagcgagccttcaaaataggtttcgccgtcgtatgccagcaggcaatcttgttccatgacctcgttgggaataaccacatgcgtcgcttcgccgcctacccacgggaaggagtagccggggcaatccgggcggtcggggagttgcaggttggcctgaatcacataacgctgacccggctggaatttgtgctgccactttttacccacggccagaatatcgccgcaaaattcgtggccgatgatgatgggattggtcgccacatcgtcgggtacttttttatggttttcacccagattggcctctttccaggaagagaggcacaggctgtcagtgaccaccgttgcgaggatttcatcctcctgcatttcaggaaggtcaaaggtttccagacgcaggtcacgtttgccataaagacgcagagctgttgttttcataaaccacctcatgttgaacgatggccccgacggttgcgccggggcgaagaatcaggacaggaagcccagcgcattaccgataatccctaaaccaaacagggcgaaaatcagccataccgggttaatttttttgttgagcagacgaaccatcagcagcgtcagaccgagcgccagcaaaccagggcaaagttggtcgaggatgttctgcacggttatggtgacggtggcaccatcggcggcaggcgtttgtgaaaccaccaacggtacgttgattgacgtccatttggtcaccagcacgcccatcacaaacagcccgagaatcgacgcgccttcggtgagtttttgcagcaaattaccgcccatatcgctgacgatattcacccctttgcgaaagccgagctgtaggccataccacttcatcgccagacgcaccgcgttgaaaataaagaagaacagcagggggccgagaatgttgcccgaaagtgccagagatgcgccgagcgcggcggtaatcgggcgcagcgttccccagaccagtggatcgccaactcctgccaatggtcccatcagaccgactttgatgccgttaatggtaccgtcatcaatttccgcgccgttggctcgcgcctcttccatggcggcagtgacgccgatgaccgggccacatacggctggcgtggtattgaagaacaccaggtgtcgcctgagcgccgcaacctgatcctcttttaatgggtaaagtcgtttgatggcggggatcatgtcgtagcaaaaacccagcccgtgaatacgttcaaagttaaaggatgcctgttgcaggttggagcgcagaaacatgctcaccagatcgctgcgtgtaatttttctctgttccatgatggctccgttaatcatcaagttggtcaagggcggtgatagtggtggtctggggatgtggttcagctttacgccactgtggatttaactggatgtagagcagggccatgatcacgccgacgccaccgaacgccagcagactgagatcgaggtagccacctgcgaggaaaccgaggaaaaagaaaggcatcaaatatttcacgcccatcatgcgaagcaccatggcgtaaccgaccaccacgataaaaccgccagcaatctgcagtccacgggtcacaaattcgggaatggcgctcagcatattgctcaccatatctgcgctgacgaacagcgagacaatcagtgccggaatagcaacgcgcagtgcctgcacgccaagcgcggagacatgcagaatatcgagagtgcgaaaccgtgcttcttccgctgctttatccgccgcgtgctggaacactacggtgatggtacgggcaaacaccgtcagcacctggcctgccgcagccacaggcaacgcgatggcgattccggtggcgatgctttgctgaccaacgataaccagaatggcggagattatgctggcgagtgcagaatccggagattgcgccgcgccgacgttcatccagccgagagctatcaattccagcgtaccaccgagcataattccggtttttaaatcaccgagaattaaaccaatcaccgtacaggcaattaacggacgatgagtctgaaattcatccagcacgctgcccattccggcaatacaggaaaaaagaaatatagcaatgatttgtagggtacttatttccatgatttgtcaccttttaagtgtcgtcatccctgcctgttaaagcatatgtacacaggcgctattatttaatttgcgattaactgttcgtttattttgtcgataatattgattgagggatctgacgctacgacgcgtaaatccagtatgacgccaagattatttaactcatgaaatgcgttaatatcatcgtcatctaatgaaactgctttggttaactgtttcttaccaggacgccaggccataccgccaatattcagggtacctatttttaccccctggcgaaccattgctaaggcatcctgtgggcgagtgaaaagataaaaaacggtttcgtcctgatattgcgggttgtgataaaccgcgacggctttttcaatattgaccacgttaaccttcattcccggtggtgcagcctgacgcaataatgtccggcgaacttcatcgttataaacttcgtcattgcagataataatgcgttgggcgttagccactttagaccagacggtagtgacctggccgtggatcaggcggtcatcaatgcgggcgagcgtaatgttcatcagaaatcctcctccgctgttgccacctgtctccagacgacgcaggtttgctttgcgatttgcgtcaggtgttcacacagttcatcaatattcatgctgtcctggttatcaaccagttcgagcgccagcggcagagaaaggccgctgattacccgcagacgaggattgcgcatcgcaagcatcgctgccgcattccacgggctgccgcactgtaaatccacggcgattagccactcatcttgattgtgaatgcttactaacttctccagctttgccacaatgtctccggcgttctcgccgggcacaaattcaacggcctcgaccctggcatcgccgtacaccatctgaaccgattccagcatggcgcaggctaatttgccgtgggcgcaaaaaatggcattgaccataaagcctccttagccgcgcgttttgccgcctgcaatgttagtggttactccggtgatatagctggcgcgttcagacagcagataacaaacaaaatcagccacttctgctaatcttccggcgcgcccaataggaatggcgtttttggtatagccttcacgcagctgctcgacggtgatattgcgcgtccacgccagcgcttcttcatattccggcgtgcgcagtcctgttttttccagaatccccggcgcgataccgaccacacggataccgtgcttgcccagctctttcgaccaggagcgcgtgaagctattgagcgcggctttggtcgcggcgtaacagctttggccttctgagccttccagcccactttctgaggaaacattcacaatcacgccatcatgttgtttgaccatctgtcgcgccaccgcctgcgacatcagaaaaacgcctttctggttgatattgaccattttttcgaatgcagcttcgttgagttcatactgcccggcaggcgctttctcatcgacaagcagacgcgggaaattgaccccggcgttgttaaccagaccgtcgatgcgaccaaaacgctggataatttctgctaccgtatgatttatctctttggcgctggaaatatcggtcggccagaactgataacctttatggctttcatactgaccatcgccaccgtgaatatcgaccatctgtacattcgcgccttgtgctaataattcatccacaatcgccagaccaatgccggatgcgccaccggtgacaataatgattttatcctgcaaatttaaccacgtttgcataacagactcctgattttagataatagggacccgccgtaatttttattacggtaaacatcgggaagatttttatttcagtaatagttcagctgtgctgctattcgttaccagacaattaatatattttccacgcagtgcaccaacaattccgctgtatttttcttcgctcatggcaatgccaatggaataccgtgcctgctttaatttattcatttcgatagagagtgttttttcgctcatattcgtttcaaccattgcgccgtgaatatcaaaaaagcgcgagcaaatatcgccagcaacctggcgggcattcaggtcgtcactctcttcaccaccataaaacgcatgccagttagcgccgtcgcgaatggccggtgagccaattcccaccagggcgacatccagattatcccagtaggcagagatggttttaaagtgctgagactgcatgatcccattacgaattaatgggttatccagcagagccggaaaatccgcgagatgcgattcccctttcagcttcgctgccgcgctgtaggttaatgtgtttacgtgatagcggctttcgagtttaccggacgggccgccaataatcggcacgcaaattaactgccgcgattgccccgcctgcggcaagttttcaaccagtgcgctcaccgcgcggccccaggaaaaaccgacaatatcgccaggttccagcaagcgatccagcagttgcgcgccgtgtaaccccatcatcgccagttgagtatcttcatcctcatcatttcctgacaccaccacaacgtctttcaggctaaacttttgcttcacttgctgctccagccagagattttcgttgtagtcatagttgatggcgatggtgacaattccctgatcgcggcctcgtttaagcaagcggctgatggtagtgcgataaatacccagttcgcgcgcaatttgcgcctgcgtcatatcctgttcgtaatagagttgggcaatcttcacaatcaaacggatatcgtcactgttttccattgccgcctcctggttctgcacatttgtgcaaatacgctttctcaccgcttgatctgatataaccccatcatgatggcctttcaaagcgatttttcactctttgcatggggggaaatagcgctttctcttgcacatttgtttctctgcgtagtagtcatcagcacaggtgtgcagcgattcgtaatttgttgattattcttattttgccaggcaaatttgcatcgtacttccggagacacttttgtgataaaaggcgtggcagatcacatttaatttcgacgttgccgcataaccctgtttttccccgctaag

SEQ ID NO: 462 - DNA, 1227 bp, Escherichia coli
atgaaaacaacagctctgcgtctttatggcaaacgtgacctgcgtctggaaacctttgaccttcctgaaatgcaggaggatgaaatcctcgcaacggtggtcactgacagcctgtgcctctcttcctggaaagaggccaatctgggtgaaaaccataaaaaagtacccgacgatgtggcgaccaatcccatcatcatcggccacgaattttgcggcgatattctggccgtgggtaaaaagtggcagcacaaattccagccgggtcagcgttatgtgattcaggccaacctgcaactccccgaccgcccggattgccccggctactccttcccgtgggtaggcggcgaagcgacgcatgtggttattcccaacgaggtcatggaacaagattgcctgctggcatacgacggcgaaacctattttgaaggctcgctggttgaaccgctttcctgcgtgattggcgcgttcaacgccaactatcatcttcaggaaggtagttataaccacacgatggggattcgcccgcaagggcgcacgctgatcctcggcggcaccggcccgatggggctgctggcgattgattatgcgttgcatggaccggttaacccgtcgctgctcgtcattaccgataccgacaacgacaaattgagttatgcacgcaagcactatccatcagaaccgcaaacactgattcattatctcaatgccgccgatgcagcatttgatacgttaatggcactgagtggcggtcacggcttcgatgatattttcgtctttgtgcctaatgaaggactggtgactctcgcctcttccttgctggcaacagatggttgtctgaatttcttcgccggaccgcaggataagcacttcagcgcgccaattaatttctacgatgtgcattatgcatttacccactacgtgggcacgtcaggcggcaatatcgacgacatgcgcgcagcggtcaaattgattgaagagaaaaaagtgcaggccgcaaaagtggtaacacatattcttgggctgaatgccgcgggcgaaaccacgcttgaattgcctgccgtcggcggcggcaaaaagctggtgtataccgggaaattcctgccgctgacgtcactcacgcagattcaggatcaagcactggcggcgattctggcgcgtcatcaggggatctggtccggtgaggcggagcaatacctgctcgcccatgcagaggcaatttcccatgat

SEQ ID NO: 463 - protein, 409 aa, Escherichia coli
MKTTALRLYGKRDLRLETFDLPEMQEDEILATVVTDSLCLSSWKEANLGENHKKVPDDVATNPIIIGHEFCGDILAVGKKWQHKFQPGQRYVIQANLQLPDRPDCPGYSFPWVGGEATHVVIPNEVMEQDCLLAYDGETYFEGSLVEPLSCVIGAFNANYHLQEGSYNHTMGIRPQGRTLILGGTGPMGLLAIDYALHGPVNPSLLVITDTDNDKLSYARKHYPSEPQTLIHYLNAADAAFDTLMALSGGHGFDDIFVFVPNEGLVTLASSLLATDGCLNFFAGPQDKHFSAPINFYDVHYAFTHYVGTSGGNIDDMRAAVKLIEEKKVQAAKVVTHILGLNAAGETTLELPAVGGGKKLVYTGKFLPLTSLTQIQDQALAAILARHQGIWSGEAEQYLLAHAEAISHD

SEQ ID NO: 464 - DNA, 822 bp, Escherichia coli
atggaacagagaaaaattacacgcagcgatctggtgagcatgtttctgcgctccaacctgcaacaggcatcctttaactttgaacgtattcacgggctgggtttttgctacgacatgatccccgccatcaaacgactttacccattaaaagaggatcaggttgcggcgctcaggcgacacctggtgttcttcaataccacgccagccgtatgtggcccggtcatcggcgtcactgccgccatggaagaggcgcgagccaacggcgcggaaattgatgacggtaccattaacggcatcaaagtcggtctgatgggaccattggcaggagttggcgatccactggtctggggaacgctgcgcccgattaccgccgcgctcggcgcatctctggcactttcgggcaacattctcggccccctgctgttcttctttattttcaacgcggtgcgtctggcgatgaagtggtatggcctacagctcggctttcgcaaaggggtgaatatcgtcagcgatatgggcggtaatttgctgcaaaaactcaccgaaggcgcgtcgattctcgggctgtttgtgatgggcgtgctggtgaccaaatggacgtcaatcaacgtaccgttggtggtttcacaaacgcctgccgccgatggtgccaccgtcaccataaccgtgcagaacatcctcgaccaactttgccctggtttgctggcgctcggtctgacgctgctgatggttcgtctgctcaacaaaaaaattaacccggtatggctgattttcgccctgtttggtttagggattatcggtaatgcgctgggcttcctgtcc

SEQ ID NO: 465 - protein, 274 aa, Escherichia coli
MEQRKITRSDLVSMFLRSNLQQASFNFERIHGLGFCYDMIPAIKRLYPLKEDQVAALRRHLVFFNTTPAVCGPVIGVTAAMEEARANGAEIDDGTINGIKVGLMGPLAGVGDPLVWGTLRPITAALGASLALSGNILGPLLFFFIFNAVRLAMKWYGLQLGFRKGVNIVSDMGGNLLQKLTEGASILGLFVMGVLVTKWTSINVPLVVSQTPAADGATVTITVQNILDQLCPGLLALGLTLLMVRLLNKKINPVWLIFALFGLGIIGNALGFLS

SEQ ID NO: 466 - DNA, 795 bp, Escherichia coli
atggaaataagtaccctacaaatcattgctatatttcttttttcctgtattgccggaatgggcagcgtgctggatgaatttcagactcatcgtccgttaattgcctgtacggtgattggtttaattctcggtgatttaaaaaccggaattatgctcggtggtacgctggaattgatagctctcggctggatgaacgtcggcgcggcgcaatctccggattctgcactcgccagcataatctccgccattctggttatcgttggtcagcaaagcatcgccaccggaatcgccatcgcgttgcctgtggctgcggcaggccaggtgctgacggtgtttgcccgtaccatcaccgtagtgttccagcacgcggcggataaagcagcggaagaagcacggtttcgcactctcgatattctgcatgtctccgcgcttggcgtgcaggcactgcgcgttgctattccggcactgattgtctcgctgttcgtcagcgcagatatggtgagcaatatgctgagcgccattcccgaatttgtgacccgtggactgcagattgctggcggttttatcgtggtggtcggttacgccatggtgcttcgcatgatgggcgtgaaatatttgatgcctttctttttcctcggtttcctcgcaggtggctacctcgatctcagtctgctggcgttcggtggcgtcggcgtgatcatggccctgctctacatccagttaaatccacagtggcgtaaagctgaaccacatccccagaccaccactatcaccgcccttgaccaacttgatgat

SEQ ID NO: 467 - protein, 265 aa, Escherichia coli
MEISTLQIIAIFLFSCIAGMGSVLDEFQTHRPLIACTVIGLILGDLKTGIMLGGTLELIALGWMNVGAAQSPDSALASIISAILVIVGQQSIATGIAIALPVAAAGQVLTVFARTITVVFQHAADKAAEEARFRTLDILHVSALGVQALRVAIPALIVSLFVSADMVSNMLSAIPEFVTRGLQIAGGFIVVVGYAMVLRMMGVKYLMPFFFLGFLAGGYLDLSLLAFGGVGVIMALLYIQLNPQWRKAEPHPQTTTITALDQLDD

SEQ ID NO: 468 - DNA, 492 bp, Escherichia coli
atgaacattacgctcgcccgcattgatgaccgcctgatccacggccaggtcactaccgtctggtctaaagtggctaacgcccaacgcattattatctgcaatgacgaagtttataacgatgaagttcgccggacattattgcgtcaggctgcaccaccgggaatgaaggttaacgtggtcaatattgaaaaagccgtcgcggtttatcacaacccgcaatatcaggacgaaaccgttttttatcttttcactcgcccacaggatgccttagcaatggttcgccagggggtaaaaataggtaccctgaatattggcggtatggcctggcgtcctggtaagaaacagttaaccaaagcagtttcattagatgacgatgatattaacgcatttcatgagttaaataatcttggcgtcatactggatttacgcgtcgtagcgtcagatccctcaatcaatattatcgacaaaataaacgaacagttaatcgcaaat

SEQ ID NO: 469 - protein, 164 aa, Escherichia coli
MNITLARIDDRLIHGQVTTVWSKVANAQRIIICNDEVYNDEVRRTLLRQAAPPGMKVNVVNIEKAVAVYHNPQYQDETVFYLFTRPQDALAMVRQGVKIGTLNIGGMAWRPGKKQLTKAVSLDDDDINAFHELNNLGVILDLRVVASDPSINIIDKINEQLIAN

SEQ ID NO: 470 - DNA, 405 bp, Escherichia coli
atggtcaatgccattttttgcgcccacggcaaattagcctgcgccatgctggaatcggttcagatggtgtacggcgatgccagggtcgaggccgttgaatttgtgcccggcgagaacgccggagacattgtggcaaagctggagaagttagtaagcattcacaatcaagatgagtggctaatcgccgtggatttacagtgcggcagcccgtggaatgcggcagcgatgcttgcgatgcgcaatcctcgtctgcgggtaatcagcggcctttctctgccgctggcgctcgaactggttgataaccaggacagcatgaatattgatgaactgtgtgaacacctgacgcaaatcgcaaagcaaacctgcgtcgtctggagacaggtggcaacagcggaggaggatttc

SEQ ID NO: 471 - protein, 135 aa, Escherichia coli
MVNAIFCAHGKLACAMLESVQMVYGDARVEAVEFVPGENAGDIVAKLEKLVSIHNQDEWLIAVDLQCGSPWNAAAMLAMRNPRLRVISGLSLPLALELVDNQDSMNIDELCEHLTQIAKQTCVVWRQVATAEEDF

SEQ ID NO: 472 - DNA, 804 bp, Escherichia coli
atgcaaacgtggttaaatttgcaggataaaatcattattgtcaccggtggcgcatccggcattggtctggcgattgtggatgaattattagcacaaggcgcgaatgtacagatggtcgatattcacggtggcgatggtcagtatgaaagccataaaggttatcagttctggccgaccgatatttccagcgccaaagagataaatcatacggtagcagaaattatccagcgttttggtcgcatcgacggtctggttaacaacgccggggtcaatttcccgcgtctgcttgtcgatgagaaagcgcctgccgggcagtatgaactcaacgaagctgcattcgaaaaaatggtcaatatcaaccagaaaggcgtttttctgatgtcgcaggcggtggcgcgacagatggtcaaacaacatgatggcgtgattgtgaatgtttcctcagaaagtgggctggaaggctcagaaggccaaagctgttacgccgcgaccaaagccgcgctcaatagcttcacgcgctcctggtcgaaagagctgggcaagcacggtatccgtgtggtcggtatcgcgccggggattctggaaaaaacaggactgcgcacgccggaatatgaagaagcgctggcgtggacgcgcaatatcaccgtcgagcagctgcgtgaaggctataccaaaaacgccattcctattgggcgcgccggaagattagcagaagtggctgattttgtttgttatctgctgtctgaacgcgccagctatatcaccggagtaaccactaacattgcaggcggcaaaacgcgcggc

SEQ ID NO: 473 - protein, 268 aa, Escherichia coli
MQTWLNLQDKIIIVTGGASGIGLAIVDELLAQGANVQMVDIHGGDGQYESHKGYQFWPTDISSAKEINHTVAEIIQRFGRIDGLVNNAGVNFPRLLVDEKAPAGQYELNEAAFEKMVNINQKGVFLMSQAVARQMVKQHDGVIVNVSSESGLEGSEGQSCYAATKAALNSFTRSWSKELGKHGIRVVGIAPGILEKTGLRTPEYEEALAWTRNITVEQLREGYTKNAIPIGRAGRLAEVADFVCYLLSERASYITGVTTNIAGGKTRG

SEQ ID NO: 474 - DNA, 945 bp, Escherichia coli
atggaaaacagtgacgatatccgtttgattgtgaagattgcccaactctattacgaacaggatatgacgcaggcgcaaattgcgcgcgaactgggtatttatcgcactaccatcagccgcttgcttaaacgaggccgcgatcagggaattgtcaccatcgccatcaactatgactacaacgaaaatctctggctggagcagcaagtgaagcaaaagtttagcctgaaagacgttgtggtggtgtcaggaaatgatgaggatgaagatactcaactggcgatgatggggttacacggcgcgcaactgctggatcgcttgctggaacctggcgatattgtcggtttttcctggggccgcgcggtgagcgcactggttgaaaacttgccgcaggcggggcaatcgcggcagttaatttgcgtgccgattattggcggcccgtccggtaaactcgaaagccgctatcacgtaaacacattaacctacagcgcggcagcgaagctgaaaggggaatcgcatctcgcggattttccggctctgctggataacccattaattcgtaatgggatcatgcagtctcagcactttaaaaccatctctgcctactgggataatctggatgtcgccctggtgggaattggctcaccggccattcgcgacggcgctaactggcatgcgttttatggtggtgaagagagtgacgacctgaatgcccgccaggttgctggcgatatttgctcgcgcttttttgatattcacggcgcaatggttgaaacgaatatgagcgaaaaaacactctctatcgaaatgaataaattaaagcaggcacggtattccattggcattgccatgagcgaagaaaaatacagcggaattgttggtgcactgcgtggaaaatatattaattgtctggtaacgaatagcagcacagctgaactattactgaaa

SEQ ID NO: 475 - protein, 343 aa, Escherichia coli
LKGHHDGVISDQAVRKRICTNVQNQEAAMENSDDIRLIVKIAQLYYEQDMTQAQIARELGIYRTTISRLLKRGRDQGIVTIAINYDYNENLWLEQQVKQKFSLKDVVVVSGNDEDEDTQLAMMGLHGAQLLDRLLEPGDIVGFSWGRAVSALVENLPQAGQSRQLICVPIIGGPSGKLESRYHVNTLTYSAAAKLKGESHLADFPALLDNPLIRNGIMQSQHFKTISAYWDNLDVALVGIGSPAIRDGANWHAFYGGEESDDLNARQVAGDICSRFFDIHGAMVETNMSEKTLSIEMNKLKQARYSIGIAMSEEKYSGIVGALRGKYINCLVTNSSTAELLLK

SEQ ID NO: 476 - DNA, 7326 bp, Escherichia coli
tttaaactcctttactgagcgacatatctgttttaagcctaacagtagtcgccaggccgcgcggggattttttccgggctgcggtcacaacccggaatatctctgatcagtattgaaacggcgtcgccgcaatccagttttgccactggcgctcaaagttggttagcgttaatacgccccgttcacggcacgggcgagtccaggtttggtaatcattagcttcccgacaaacacaaatcatatattgcctggcatcctgattttctggccgaaaacgccaggccaggagtggcccacctggtgtttgcggtgcaataccggcttcgccatcatagatagccctggcaccacgactcccaccaccgttttcgacataacattgtaaagaacgcagtacagccagcgccagttgcgcactttgccgccactggaaagattgtgccaggctgttttcatcgcattgaataccttcccggcgaatatcttcacaaagtgttgccagggtttgcgcggcagtgttgatcccctgtgtatgacacaaaattgcggcatggtggctcatggtattttgtatcgtttctcgcacgtcgtcacgtagcagcccctgattcaggtgctgttgcgcctcattaatcgtactgagaatttgttgcctctcgagaggccggtcctggcttttctgatgagcaatatgtaatgcacagcggcgggcgaaaacttgcccggcattgagcgctgctccacctgggcgcgtgacaccatgtgttccggcattttctccggcagcataacaaccagttagcgatgtacgtgcccaaatatcaacttcaattccgccattaagatgttgattatttagcgtaaacttgagcggtgaggctgtgagatcatgaccgtgcatctgatacaaacgaatagccagaggattcatctgtgttaatctcgccagcggttgtgccagcagggcgtgattttgttgcagatagtcgatgacatcatcatccagctcccgcaggttaaatagtgttccgtccgctgcgggttctggttcccgtagaaaatcgagaaaaacatcgcgccctttttgagtctcttcataaactgcgacatccagcaagctggagccatattccagcattcgttccgcgtgaaacggccactggtaacctttgcgaaatatcgcggaggccagcatacgagtcgtggggtaataagttgccagaaaattatactgacgcccggagtggtcctgcgaatagatgcgcggcatcgcctgcatgtaagtaccggaaagattccacggaaactggctgcgcggtgtaccgataccaaactgactttccgtaagattaaccagagttatccctgcttccagcgccatgcccaacgcactaaaacagttcaccggataaacactgtcacgataaagttcaccaggcccgcccgtggctaaaaccagatgctgacagcgaatcactaccattctccagggattatcccgacaggctttatcgatggcgatcaccccctcgactcgtcgattttctccttcaccactggtcaggatacgaatcgccgttgtgtgatcgcaaagaggaatattaaggcgcattgcctcctgggccagcaccttcaccatcaggcgcgatgttcgaggaccgcagctagtggcacggccaaattcatcgtgatcggtttgataacgcaacgttgcgccaaagagatcttcaggcaaatccagacccagatatttcagtacttcacaggtgttcaccgatccgagcgcctcaacatatgcggtgtcatgatccatcgcaccacctgccgccagggtgttacttaatgtcagaaaatggtcaccatttgcacgcgtattcgcggtgtgaagcgtttgtttatcagaaccagaacaggcggaagttccccagaaggctttgctggaggctaccattacatcgacattttgccgtttcagctcgacggcagctcgccatcctgccgcgccactgcccagaaccagcgtgttgcagcggtactcaggtaaaatggtaccgttaaggtcgatactaccgctgacttgagccagcggtgcgtaatggggcattttcacgtcagtcagggaatcgataatagattcagagacattatgcgtcatggtaggtgcccgtagtctggttatgttgggaaacgctgatcgtttcagcgtcggcaagatcatcaagatcacgatcgcgtgtttctggagcaaagaaagtcgcaataatcgtaccaacggtcagcagactaaggtaaatagcgattggcatccaggcagcaataccactgggatcgttagtgtggatcacccaggaaatgattgcagaaccaaccagtggcgcgatccctccggcaataacggcagaaacttcccttgccagtgcgacgccaatataacgatggcgagcaccaaagagttcaggcagaaaagcaccttgtgcaccaaacataccccaggctccaatccctaaggccagagaaagagagacaatagtgacaggaacattaccgtggctgaaagaccaccacaccggaaaggtaatcaacaactgaaaaatcgccagactacgatagacaagaaccctgccgaagcgatcggtcagccaaccggcaataggcaccataattgcaccgactactaccgcagacatcaggcatagcgtaccaactgatttgtccagcccaaccacaccaacgatataactgatcgctaaagcctgataaatcgacgagccgccgttttctgccagacgtaagccaatcccgacgaagacattacggcgtgatgttttcagcaaatttcgtaagggtgattctgtaacttgttgacgagcttcgagttttgcgaatgatggcgattctttaagatgcagtcgaatataaatagccaccgcgataatcaccacgctggagaggaagggcaagcgccaccaccaggtttcggcaagatttgtcacattatgcagcaggatgaagtaaacggcagatgccataaacgtaccaatctggattccgaggaacggcagcgcggcgtaataaccccgtttgccgtcaggagcatattcggtcatcagtacggcggctcccgcctgttcagccccagcaccaagcccttgcagcaggcgtaatgcaataagcataattggcgcccagattcccgctgtttcgtaagtgggtaataccccgatcaacgtgctggcgattcccattaacaacaccgttgctaacaggacgaacttacggcccaaacgatcacctaatgagccgaagagaattccgcctacaggtctgacggcaaatccgagaaagtaggtgccaaaactggcgatcagcgccattcccggttcctgattaggaaaaaagagtggaccaaaaataatggcggatgccaggctgtaaagtgcgaaatcgtagtattccagtgcgctgccgagagagcaggtccacgccgcgcgacgcagatctgccgatgaaacattcgctttctctgctggttgtgaaggttgcatgatgtgtctcctttcagacggataaaagaaatccgcctaaaatcaatgggattcttgcgttattattaaaatccaaaatgaaatgctaagttatcgagcactaaagtgcggttgacgcttctcagtaaatgcctgactgccttcatgagcatcttcagtcgtggcggaaaaagcgccagccagtgcttcaagcgtcgaggccacagcaataccttctccggcatcaataacctgcttggcgatctgcactgcaacgggagcacgctgggcgatacgttgtgccagttgcagtccggcgtcgtgtaacgtctccctggcgacaacgcgattcaccagcccgcaggacagtgcccgctgtgcatccagtggttcaccggtaaataccagttctttcaccagtgagcgcccaagcagtgccgtcagccgctgcgttcctgaccagccaggcactgtcgccagcccggtttctggtagtgccatttgtgcttcggcgctacaaatacggatatcggcggtagcagccagttccagaccaccgccataagccaggccgtgcaacagggcgattacgggctgtggcagttgtgccagagcatcaaatgcctgatgaccgcggcggatccagttgcgccacatatcgagtgcagaaagagaggtccagcgatgaatatccgcgccgacacaaaacgctttttcactggcactggtcagcagtactacgcggatctccgaatcagtttccaacgtgtggcaatgcgccagcagttgttcgagcatctctggggttaatgcgttgagtttcgccgggcgattaatcaccaaagtggcaatgaaaccgttgcgctggaggtcaatggtgccgttattcatggtgacgtccttgttgaaaatagtggggattcattagtttgagatcgtctgccagacggagtggggcatcgctttgggcgagaatgtcgcgttcaggatcaatacctggggcaatttccgtgaccagtagtccgtctggggttaattccagcacgcagcgttcagtgatgtactgcacttgttgcccgagtcttattgcgcgtttgccggagaacgtcacgtgggcgacgtcctgtaccagttttttggctttgccttctttaatgatacgcagctgaccttcttccagttgcagttgggcaccggcattgaaaaagccagagaaaataatgcgcttcgcatgtgaggtgatatcaataaatccaccgcatccggcagtgacatgtggacgagcggggagatgtgagacgttcactgagccatctgcgccgatttgtaaaaacgacatcagagtgagatcaaagccaccgccctggaaataggtgaactgctggggagagggcaaaaatgcttctgcattagaggcacaaccgaactgaaattccagcagtggaactccgccaatcgcgccctgttccagcagccaggtgacgtcaccgtggcgaccttgttccagtagaatgcgtggtacgttggcagaaataccaaagccaatatttaccgcatctccactttgtagttcttgcgcgactcgctgggcaataactcgcgccgggccatgttccatataacgaaaggctgatagcggacgactgatttcgccggaaatggcaggttcatattgcgtttgtgtcgtttgtgtttgttccggcgcaatcacgatgtaatccaccagtacacccggaatacgcacctcttttggtttcagacttccggcggcaacctgtcgttttacttgcgcaattatgatgccaccattattgcgaacggcagtagcctgttccagtggccccagataagccccttcatgttcataagtcaggttgccgcgttcatcggcagtggtagcgcgaatgatcgccacctgcggcacgatactggggaaaaacagccagtcgtcgttagcaaatcgaacacgttcaaccagagattgttgcgccgctttttcattcattgcaccgccctgcaacaggggatccacataggtatccatgcctgtttgtgtcagcacgccaggacgatgagccgccgcttcccggtgcatatcaaataagatcccggaaggcagattccaggcggggatcgcgttgtcattgatcatttgccagattaacggaggtgccattgatgatggaccggaggggtaggagccagcgatcacttttgccagtaagcccggttgcgccagatgatcgatgccttttacgccatacatatcaccagcggcgatagggtggatggaggtgatgttttgcggatgtccggcacgttgaaagcgttcacctattgctgccagcacagcatccggacaccccattccactggaggaggagacggtgacaactgcgccatcaacaatcaaatctgcagcttccggtgcagtgatcgtgcgtacagagcacataataatttccttgtttcgatataaaaataattaaaaatatgcatttaaaacaatatgataattttcataaattaattggaacgatctaatttatgcgtaatttgtacgattagggtgtaaaaaacacaacaagggaagtgcgaatctgtgatcgaaacgacgatctcctgcgatcccttgcgttaacggatcgcatgagtaaaaggagattatgataaagtaattgccttgatcttatggggggttggagcaggcatggcgaagtcggatacaggaagaaagcgggtaacattaaccgatgttgcgcgtgcggctggcgtttcgaaatcgaccgtatcgctggttctcaacgacagttcacttatcaaaaaagagactcaacaaaaagtccagcaagccattgaacaattaggctatgtctataaccgttttgctgccaatctgcgttcgcaaaaatcgctaactatcggcgtagtcattgacgatttgataaatcctttcttcgctgaatttactatgggtcttgagatgacgctggcggagcacggttttatcaccgtgatgtccaatacctcccagcgtagtgaccggcaaaaacaggtgcttgataccttgctggaacaccacgtcgcgggcattgtcctctgtccagtgaacagtacctcagaagccgatttacagcgttatgccaacagttccacacccttattaatcacgatgcgtcctctggattggcaacaattgcccgtcgattacgttggcgtggacagccacgcaggtgtacgggaagcgacggaatatctcattcaacaagggcacagagatatcgtgtttattggtggtcttacgcaccatatgcgttatcagggataccttgaggcgatgaatcaccatggtttacagccgtggagtactgatgctttttcgctgcgtgctgaaccgactcaggccaacggctaccagttgatgcaacagctgttggatatgccttcgccacccacagcggtgatttgttataacgatttaatggcttttggcgcggagtcggcactaggcgaaagaggattatttgccggggaagatatttcgttgattggtaatgatggcgtggcggcttgtgcttacagtaacccgccgttaaccacaattgcggtagaaccattggctctggggaaacaggcggcgcagcaaattttacggcgtattgcgcaaccagacgcaccgctcagccattacatctatcgcccgaccctgcaaattcgcgcttccaccggaaagcgggggcgttaaatgctgtagcgagaaactgtttctcgctatactctcttgtcccccattcaacagcag

SEQ ID NO: 477 - DNA, 2046 bp, Escherichia coli
atgacgcataatgtctctgaatctattatcgattccctgactgacgtgaaaatgccccattacgcaccgctggctcaagtcagcggtagtatcgaccttaacggtaccattttacctgagtaccgctgcaacacgctggttctgggcagtggcgcggcaggatggcgagctgccgtcgagctgaaacggcaaaatgtcgatgtaatggtagcctccagcaaagccttctggggaacttccgcctgttctggttctgataaacaaacgcttcacaccgcgaatacgcgtgcaaatggtgaccattttctgacattaagtaacaccctggcggcaggtggtgcgatggatcatgacaccgcatatgttgaggcgctcggatcggtgaacacctgtgaagtactgaaatatctgggtctggatttgcctgaagatctctttggcgcaacgttgcgttatcaaaccgatcacgatgaatttggccgtgccactagctgcggtcctcgaacatcgcgcctgatggtgaaggtgctggcccaggaggcaatgcgccttaatattcctctttgcgatcacacaacggcgattcgtatcctgaccagtggtgaaggagaaaatcgacgagtcgagggggtgatcgccatcgataaagcctgtcgggataatccctggagaatggtagtgattcgctgtcagcatctggttttagccacgggcgggcctggtgaactttatcgtgacagtgtttatccggtgaactgttttagtgcgttgggcatggcgctggaagcagggataactctggttaatcttacggaaagtcagtttggtatcggtacaccgcgcagccagtttccgtggaatctttccggtacttacatgcaggcgatgccgcgcatctattcgcaggaccactccgggcgtcagtataattttctggcaacttattaccccacgactcgtatgctggcctccgcgatatttcgcaaaggttaccagtggccgtttcacgcggaacgaatgctggaatatggctccagcttgctggatgtcgcagtttatgaagagactcaaaaagggcgcgatgtttttctcgattttctacgggaaccagaacccgcagcggacggaacactatttaacctgcgggagctggatgatgatgtcatcgactatctgcaacaaaatcacgccctgctggcacaaccgctggcgagattaacacagatgaatcctctggctattcgtttgtatcagatgcacggtcatgatctcacagcctcaccgctcaagtttacgctaaataatcaacatcttaatggcggaattgaagttgatatttgggcacgtacatcgctaactggttgttatgctgccggagaaaatgccggaacacatggtgtcacgcgcccaggtggagcagcgctcaatgccgggcaagttttcgcccgccgctgtgcattacatattgctcatcagaaaagccaggaccggcctctcgagaggcaacaaattctcagtacgattaatgaggcgcaacagcacctgaatcaggggctgctacgtgacgacgtgcgagaaacgatacaaaataccatgagccaccatgccgcaattttgtgtcatacacaggggatcaacactgccgcgcaaaccctggcaacactttgtgaagatattcgccgggaaggtattcaatgcgatgaaaacagcctggcacaatctttccagtggcggcaaagtgcgcaactggcgctggctgtactgcgttctttacaatgttatgtcgaaaacggtggtgggagtcgtggtgccagggctatctatgatggcgaagccggtattgcaccgcaaacaccaggtgggccactcctggcctggcgttttcggccagaaaatcaggatgccaggcaatatatgatttgtgtttgtcgggaagctaatgattaccaaacctggactcgcccgtgccgtgaacggggcgtattaacgctaaccaactttgagcgccagtggcaaaactggattgcggcgacgccgtttcaatac

SEQ ID NO: 478 - protein, 682 aa, Escherichia coli
MTHNVSESIIDSLTDVKMPHYAPLAQVSGSIDLNGTILPEYRCNTLVLGSGAAGWRAAVELKRQNVDVMVASSKAFWGTSACSGSDKQTLHTANTRANGDHFLTLSNTLAAGGAMDHDTAYVEALGSVNTCEVLKYLGLDLPEDLFGATLRYQTDHDEFGRATSCGPRTSRLMVKVLAQEAMRLNIPLCDHTTAIRILTSGEGENRRVEGVIAIDKACRDNPWRMVVIRCQHLVLATGGPGELYRDSVYPVNCFSALGMALEAGITLVNLTESQFGIGTPRSQFPWNLSGTYMQAMPRIYSQDHSGRQYNFLATYYPTTRMLASAIFRKGYQWPFHAERMLEYGSSLLDVAVYEETQKGRDVFLDFLREPEPAADGTLFNLRELDDDVIDYLQQNHALLAQPLARLTQMNPLAIRLYQMHGHDLTASPLKFTLNNQHLNGGIEVDIWARTSLTGCYAAGENAGTAGVTRPGGAALNAGQVFARRCALHIAHQKSQDRPLERQQILSTINEAQQHLNQGLLRDDVRETIQNTMSHHAAILCHTQGITNAAQTLATLCEDIRREGIQCDENSLAQSFQWRQSAQLALAVLRSLQCYVENGGGSRGARAIYDGEAGIAPQTPGGPLLAWRFRPENQDARQYMICVCREANDYQTWTRPCRERGVLTLTNFERQWQNWIAATPFQY

SEQ ID NO: 479 - DNA, 1398 bp, Escherichia coli
atgcaaccttcacaaccagcagagaaagcgaatgtttcatcggcagatctgcgtcgcgcggcgtggacctgctctctcggcagcgcactggaatactacgatttcgcactttacagcctggcatccgccattatttttggtccactcttttttcctaatcaggaaccgggaatggcgctgatcgccagttttggcacctactttctcggatttgccgtcagacctgtaggcggaattctcttcggctcattaggtgatcgtttgggccgtaagttcgtcctgttagcaacggtgttgttaatgggaatcgccagcacgttgatcggggtattacccacttacgaaacagcgggaatctgggcgccaattatgcttattgcattacgcctgctgcaagggcttggtgctggggctgaacaggcgggagccgccgtactgatgaccgaatatgctcctgacggcaaacggggttattacgccgcgctgccgttcctcggaatccagattggtacgtttatggcatctgccgtttacttcatcctgctgcataatgtgacaaatcttgccgaaacctggtggtggcgcttgcccttcctctccagcgtggtgattatcgcggtggctatttatattcgactgcatcttaaagaatcgccatcattcgcaaaactcgaagctcgtcaacaagttacagaatcacccttacgaaatttgctgaaaacatcacgccgtaatgtcttcgtcgggattggcttacgtctggcagaaaacggcggctcgtcgatttatcaggctttagcgatcagttatatcgttggtgtggttgggctggacaaatcagttggtacgctatgcctgatgtctgcggtagtagtcggtgcaattatggtgcctattgccggttggctgaccgatcgcttcggcagggttcttgtctatcgtagtctggcgatttttcagttgttgattacctttccggtgtggtggtctttcagccacggtaatgttcctgtcactattgtctctctttctctggccttagggattggagcctggggtatgtttggtgcacaaggtgcttttctgcctgaactctttggtgctcgccatcgttatattggcgtcgcactggcaagggaagtttctgccgttattgccggagggatcgcgccactggttggttctgcaatcatttcctgggtgatccacactaacgatcccagtggtattgctgcctggatgccaatcgctatttaccttagtctgctgaccgttggtacgattattgcgactttctttgctccagaaacacgcgatcgtgatcttgatgatcttgccgacgctgaaacgatcagcgtttcccaacataaccagactacgggcacctaccatgacgca

SEQ ID NO: 480 - protein, 466 aa, Escherichia coli
MQPSQPAEKANVSSADLRRAAWTCSLGSALEYYDFALYSLASAIIFGPLFFPNQEPGMALIASFGTYFLGFAVRPVGGILFGSLGDRLGRKFVLLATVLLMGIASTLIGVLPTYETAGIWAPIMLIALRLLQGLGAGAEQAGAAVLMTEYAPDGKRGYYAALPFLGIQIGTFMASAVYFILLHNVTNLAETWWWRLPFLSSVVIIAVAIYIRLHLKESPSFAKLEARQQVTESPLRNLLKTSRRNVFVGIGLRLAENGGSSIYQALAISYIVGVVGLDKSVGTLCLMSAVVVGAIMVPIAGWLTDRFGRVLVYRSLAIFQLLITFPVWWSFSHGNVPVTIVSLSLALGIGAWGMFGAQGAFLPELFGARHRYIGVALAREVSAVIAGGIAPLVGSAIISWVIHTNDPSGIAAWMPIAIYLSLLTVGTIIATFFAPETRDRDLDDLADAETISVSQHNQTTGTYHDA

SEQ ID NO: 481 - DNA, 777 bp, Escherichia coli
atgaataacggcaccattgacctccagcgcaacggtttcattgccactttggtgattaatcgcccggcgaaactcaacgcattaaccccagagatgctcgaacaactgctggcgcattgccacacgttggaaactgattcggagatccgcgtagtactgctgaccagtgccagtgaaaaagcgttttgtgtcggcgcggatattcatcgctggacctctctttctgcactcgatatgtggcgcaactggatccgccgcggtcatcaggcatttgatgctctggcacaactgccacagcccgtaatcgccctgttgcacggcctggcttatggcggtggtctggaactggctgctaccgccgatatccgtatttgtagcgccgaagcacaaatggcactaccagaaaccgggctggcgacagtgcctggctggtcaggaacgcagcggctgacggcactgcttgggcgctcactggtgaaagaactggtatttaccggtgaaccactggatgcacagcgggcactgtcctgcgggctggtgaatcgcgttgtcgccagggagacgttacacgacgccggactgcaactggcacaacgtatcgcccagcgtgctcccgttgcagtgcagatcgccaagcaggttattgatgccggagaaggtattgctgtggcctcgacgcttgaagcactggctggcgctttttccgccacgactgaagatgctcatgaaggcagtcaggcatttactgagaagcgtcaaccgcactttagtgctcga

SEQ ID NO: 482 - protein, 259 aa, Escherichia coli
MNNGTIDLQRNGFIATLVINRPAKLNALTPEMLEQLLAHCHTLETDSEIRVVLLTSASEKAFCVGADIHRWTSLSALDMWRNWIRRGHQAFDALAQLPQPVIALLHGLAYGGGLELAATADIRICSAEAQMALPETGLATVPGWSGTQRLTALLGRSLVKELVFTGEPLDAQRALSCGLVNRVVARETLHDAGLQLAQRIAQRAPVAVQIAKQVIDAGEGIAVASTLEALAGAFSATTEDAHEGSQAFTEKRQPHFSAR

SEQ ID NO: 483 - DNA, 1569 bp, Escherichia coli
atgtgctctgtacgcacgatcactgcaccggaagctgcagatttgattgttgatggcgcagttgtcaccgtctcctcctccagtggaatggggtgtccggatgctgtgctggcagcaataggtgaacgctttcaacgtgccggacatccgcaaaacatcacctccatccaccctatcgccgctggtgatatgtatggcgtaaaaggcatcgatcatctggcgcaaccgggcttactggcaaaagtgatcgctggctcctacccctccggtccatcatcaatggcacctccgttaatctggcaaatgatcaatgacaacgcgatccccgcctggaatctgccttccgggatcttatttgatatgcaccgggaagcggcggctcatcgtcctggcgtgctgacacaaacaggcatggatacctatgtggatcccctgttgcagggcggtgcaatgaatgaaaaagcggcgcaacaatctctggttgaacgtgttcgatttgctaacgacgactggctgtttttccccagtatcgtgccgcaggtggcgatcattcgcgctaccactgccgatgaacgcggcaacctgacttatgaacatgaaggggcttatctggggccactggaacaggctactgccgttcgcaataatggtggcatcataattgcgcaagtaaaacgacaggttgccgccggaagtctgaaaccaaaagaggtgcgtattccgggtgtactggtggattacatcgtgattgcgccggaacaaacacaaacgacacaaacgcaatatgaacctgccatttccggcgaaatcagtcgtccgctatcagcctttcgttatatggaacatggcccggcgcgagttattgcccagcgagtcgcgcaagaactacaaagtggagatgcggtaaatattggctttggtatttctgccaacgtaccacgcattctactggaacaaggtcgccacggtgacgtcacctggctgctggaacagggcgcgattggcggagttccactgctggaatttcagttcggttgtgcctctaatgcagaagcatttttgccctctccccagcagttcacctatttccagggcggtggctttgatctcactctgatgtcgtttttacaaatcggcgcagatggctcagtgaacgtctcacatctccccgctcgtccacatgtcactgccggatgcggtggatttattgatatcacctcacatgcgaagcgcattattttctctggctttttcaatgccggtgcccaactgcaactggaagaaggtcagctgcgtatcattaaagaaggcaaagccaaaaaactggtacaggacgtcgcccacgtgacgttctccggcaaacgcgcaataagactcgggcaacaagtgcagtacatcactgaacgctgcgtgctggaattaaccccagacggactactggtcacggaaattgccccaggtattgatcctgaacgcgacattctcgcccaaagcgatgccccactccgtctggcagacgatctcaaactaatgaatccccactattttcaacaaggacgtcaccatgaa

SEQ ID NO: 484 - protein, 523 aa, Escherichia coli
MCSVRTITAPEAADLIVDGAVVTVSSSSGMGCPDAVLAAIGERFQRAGHPQNITSIHPIAAGDMYGVKGIDHLAQPGLLAKVIAGSYPSGPSSMAPPLIWQMINDNAIPAWNLPSGILFDMHREAAAHRPGVLTQTGMDTYVDPLLQGGAMNEKAAQQSLVERVRFANDDWLFFPSIVPQVAIIRATTADERGNLTYEHEGAYLGPLEQATAVRNNGGIIIAQVKRQVAAGSLKPKEVRIPGVLVDYIVIAPEQTQTTQTQYEPAISGEISRPLSAFRYMEHGPARVIAQRVAQELQSGDAVNIGFGISANVPRILLEQGRHGDVTWLLEQGAIGGVPLLEFQFGCASNAEAFLPSPQQFTYFQGGGFDLTLMSFLQIGADGSVNVSHLPARPHVTAGCGGFIDITSHAKRIIFSGFFNAGAQLQLEEGQLRIIKEGKAKKLVQDVAHVTFSGKRAIRLGQQVQYITERCVLELTPDGLLVTEIAPGIDPERDILAQSDAPLRLADDLKLMNPHYFQQGRHHE

SEQ ID NO: 485 - DNA, 1059 bp, Escherichia coli
ttgatcttatggggggttggagcaggcatggcgaagtcggatacaggaagaaagcgggtaacattaaccgatgttgcgcgtgcggctggcgtttcgaaatcgaccgtatcgctggttctcaacgacagttcacttatcaaaaaagagactcaacaaaaagtccagcaagccattgaacaattaggctatgtctataaccgttttgctgccaatctgcgttcgcaaaaatcgctaactatcggcgtagtcattgacgatttgataaatcctttcttcgctgaatttactatgggtcttgagatgacgctggcggagcacggttttatcaccgtgatgtccaatacctcccagcgtagtgaccggcaaaaacaggtgcttgataccttgctggaacaccacgtcgcgggcattgtcctctgtccagtgaacagtacctcagaagccgatttacagcgttatgccaacagttccacacccttattaatcacgatgcgtcctctggattggcaacaattgcccgtcgattacgttggcgtggacagccacgcaggtgtacgggaagcgacggaatatctcattcaacaagggcacagagatatcgtgtttattggtggtcttacgcaccatatgcgttatcagggataccttgaggcgatgaatcaccatggtttacagccgtggagtactgatgctttttcgctgcgtgctgaaccgactcaggccaacggctaccagttgatgcaacagctgttggatatgccttcgccacccacagcggtgatttgttataacgatttaatggcttttggcgcggagtcggcactaggcgaaagaggattatttgccggggaagatatttcgttgattggtaatgatggcgtggcggcttgtgcttacagtaacccgccgttaaccacaattgcggtagaaccattggctctggggaaacaggcggcgcagcaaattttacggcgtattgcgcaaccagacgcaccgctcagccattacatctatcgcccgaccctgcaaattcgcgcttccaccggaaagcgggggcgt

SEQ ID NO: 486 - protein, 353 aa, Escherichia coli
LILWGVGAGMAKSDTGRKRVTLTDVARAAGVSKSTVSLVLNDSSLIKKETQQKVQQAIEQLGYVYNRFAANLRSQKSLTIGVVIDDLINPFFAEFTMGLEMTLAEHGFITVMSNTSQRSDRQKQVLDTLLEHHVAGIVLCPVNSTSEADLQRYANSSTPLLITMRPLDWQQLPVDYVGVDSHAGVREATEYLIQQGHRDIVFIGGLTHHMRYQGYLEAMNHHGLQPWSTDAFSLRAEPTQANGYQLMQQLLDMPSPPTAVICYNDLMAFGAESALGERGLFAGEDISLIGNDGVAACAYSNPPLTTIAVEPLALGKQAAQQILRRIAQPDAPLSHYIYRPTLQIRASTGKRGR

SEQ ID NO: 487 - DNA, 713 bp, Escherichia coli
tcactttggggccagctaaacactggtcccaaaattattctgccgggctttcaatccctttttttagccactctttaaggctcagaaccgagttatcttcgtcttcgtggaatatgatattgtcgatctgccaacagccatcatcagcggaacgcgccattagcgcttcgtcctgccaggcctttttatcatcaacgctaaaatgaaaatggagggtgacagtgacgttgttatcaccaggtttaaacgatgacggtagcgtcacgccatcaaatttctcatagtaactatccgaaggataagacgtgaaaataatcccgtcaccaaaagtaggtttggccgtgggatcaatggcgtagtcgcgtttatttctgtcatacgcgccaacaataagttgataaagcgagggggtgaggtaattctgaaaaaatgccagctggtctttttcactcttaaagccggtatcagaaaaaacataggttgaataaaacttatctgcgacaccgtcaggtgtctgcaccgggcaagcccccgtcgcggcaggcgttatacctgcgattagcagaaaaaagaaaacaaattttatctttgtcatggctgaaaatccgatatcatcttgccgtttataaacccatccctggatgtggaatagcatactccggtcatatctgtttagcgaggttttgcactggtgggcagaacctgaaaaaaag

SEQ ID NO: 488 - DNA, 618 bp, Escherichia coli
atgctattccacatccagggatgggtttataaacggcaagatgatatcggattttcagccatgacaaagataaaatttgttttcttttttctgctaatcgcaggtataacgcctgccgcgacgggggcttgcccggtgcagacacctgacggtgtcgcagataagttttattcaacctatgttttttctgataccggctttaagagtgaaaaagaccagctggcattttttcagaattacctcaccccctcgctttatcaacttattgttggcgcgtatgacagaaataaacgcgactacgccattgatcccacggccaaacctacttttggtgacgggattattttcacgtcttatccttcggatagttactatgagaaatttgatggcgtgacgctaccgtcatcgtttaaacctggtgataacaacgtcactgtcaccctccattttcattttagcgttgatgataaaaaggcctggcaggacgaagcgctaatggcgcgttccgctgatgatggctgttggcagatcgacaatatcatattccacgaagacgaagataactcggttctgagccttaaagagtggctaaaaaaagggattgaaagcccggcagaa

SEQ ID NO: 489 - protein, 206 aa, Escherichia coli
MLFHIQGWVYKRQDDIGFSAMTKIKFVFFFLLIAGITPAATGACPVQTPDGVADKFYSTYVFSDTGFKSEKDQLAFFQNYLTPSLYQLIVGAYDRNKRDYAIDPTAKPTFGDGIIFTSYPSDSYYEKFDGVTLPSSFKPGDNNVTVTLHFHFSVDDKKAWQDEALMARSADDGCWQIDNIIFHEDEDNSVLSLKEWLKKGIESPAE

SEQ ID NO: 490 - DNA, 13757 bp, Escherichia coli
  misc_feature (1642)..(1642): unknown
  misc_feature (3450)..(3450): unknown
  misc_feature (3592)..(3592): unknown
tgattttaatcaacaggcggatctctccgcctgttcctgactccagccatcccctactattctgtcccttttttcgcccacttttacatcatctcttttctataagtttttgaaaattagtgtttttaactgttggtacggattgtgcagtaatgcggctgtctatgaccatcaggagaaaaacatggagaacatgacctcgcccggcacgctgcttagtggagataacgcgacctggcttgaagagtactaccagacctggttgcgtacgccggaacaactcccggaagactggcggcgtttttttctttcacctgaactgactgtccaaagcgtatccggtgataacaacgtcagcggtgcgacgttaaaaaaacaggctgcggtaatacaactgatcaatgcctggcgcacgcaggggcatctgcgcgcaaagcttgatccacttggtttgaatcccccggctgacgttccctccctccagcctggtttttggggattaagcgaagaagacttgttgcaggaatttagcgtcacctttggcgcacacaccacgcaaatgccacttaagcaactgcttaacctgctggagcaagcctgggcgggtagccaggcttatgaacttgctcatctggaaaatcgtgaagaaatcaactggttgttatcacggattgagagcagcaatgcgccacaagcagatgtacaaacctgtattgctcgttttgaaaaactgatggcggcagagacgttagagcgttatctgcatacccgttatgttgggcagaaacggttttctctggaagggggcgaaagtgcaatcccggcgctcgatacgctgacaaaacgcctgcgtgcgcaaggtgtggaggaaatggtcattggcatggcgcaccggggaagacttaatgttctggttaatctgttgaataaagacccggcacagctttttgctgagtttgaaggcaagcagacgatcggcagtggttcaggcgatgtgaaataccacatggggtattccagcaatctggaaacacctgccggttcgctgcatgtggcgctggcgtataacccctcacatctggagatcgtgaatccggtggtgctgggccaggtgcgagccaggcaggaacgccgtggtgaggatggtcaggcaaaagtggtgggcgtacttattcatggggattccgcgttgggcggcctcggcgtcaaccaaaccacgtttaacttatcgcagactcagggctacggcactggcggtacgctacatctggtgattaacaatcagattggcttcaccacttcccgcttgcaggatatgcgttcttcacggtactgcaccgatattgccaaaatggtagcggccccaattatccacgttaatggcgatgacgttgacgctgtttgccaggtaatggaactggcgtgcgaatggcgagacaccttccggcgcgacatcatcatcgatatttgctgcttccgtaagcacggacacaacgaaagcgatgagccacgtcttacccagccacaaatgtatcaggcagtggatgctcaccctggtacgctcgcccgttatggtgaatctcttgcccgccgcggcctgttaactcaggcgcaacaagatgagatgacggcacgctatcgngactggctggatagctgccagaaacgtgaaccgcagcctctcaaacctgcaattcactcttttagcgctaactggtatgggttgaccaaccctcactggagcgccccggtatctacggcattgcctcggcaaaagctggcagcgtatggtgaaatcatttctacgctgccacccgatgtggtcgcacatcctaccattaaacggcaactggcgttacgccaggatatggccgcaggtactcagccaatagactggggaatggctgaaatgctggcctatgcatcgcttgtggatgcgggtgttggtgtgcgtctttctggtgaagactcagggcgtggcacgttcagtcatcgccatgcagtggtacatcatcaaactgaagcccgtcgttatctgccgttacagcatatccgcgctggtcaggcatctttcgatgtttatgattcggtgcttaatgaagaagcgctcttagcctttgaatatggctattcaacgtctgcgcctcagcaactggttatttgggaagcacagtttggtgactttgccaacggcgctcaggttgctattgaccagtttatctcgtctggcgaaaccaagtgggatcgctatagcgggtttaaccattcttctgccgcatggctatgacggacaagggccggagcactcttctgcgcgtcctgagcgctggctgcaactgtgcgcagaaaacaacatgcaggtggtgatgcccagtgagtcagcacaaatgttccatttgttgcgcggtcaggcattacgcccaatgcgcaaaccgttagtgataatgatgagtaagcgtttacttcggtttaaaggcgctatgagcgagctttgtgaattcactgatggcgcttataaaccggtaatcaccgatccgcaattgcatcagtcccagaaagttaagcgcgttattttgtgtagcggccaggtctattacgacgtactggaagcccgtaagcagcgtgagcatgaagacgaagtggcgattgttcgcctggagcaactctacccgttcccggtcgcagaactgaatgatgttctggcgagttggccgaactgctgcgaatggatttggttgcaggaagagccagaaaaccagggcgcgtggcggcagattcgtcatgagctggcggcactgaaaattaacactccttactggcagtatgcaggccgcccggcagcggcagctccggcgacagggtatgggcgtgtacataaacaacaaatcgacgaatttcttgctgctgcgtttgcagatattcagccatgaaaggcgcacaaaaataataaggagaacattttatgatcgaaattactgtccctgtattaccggaatctgtcacggaaggcacgctgacaacctggtgtaaacaagaaggcgagcacgtaaaacgcgatgatgtgattgccgagctggaaaccgataaagtcattctggaaataccggccccgcacgatggcgtgttaagcaatattatcgtcagcgaaggtagcacggtcacgtccgcgcaactgttggcgcatcttaagccgcaagctgtcatagaagaaaccgtcacaccagtcaccgaaaccctggcgatgccttccgcacggctggaggcacagcgtagtggtgtcgaacttgctgacgttgcggggagcgggagaaatggacgtatcctgaaagaggatgtacaagcgcgttactcctgcaccagtcattcagcctgaacgggtggcggagatcgctgccatgctaaacccttgacaccgggtgctcgtcaggaacgtcgtgagccgatgtcgcngcttacgtcagcggattgctgagcgtctgctggcttcccaacaaaataacgccattcttaccacattcaacgaagtaaacatgcagagcgtgatggatttacagccgcccgcgtggaaagatctgttttgccgagaagcacngcgtgaagctgggctttatgtccttctttgttaaggccgttacccgggcgcaggagcgcttccctgtagtgaatgccagcgttgatggcaacgagattatctggcgtgattattgcgatatcggcattgcagtgagcagcaaccgcggcctggtagtgcctgtgttacgcaatgcgcaatcactctctttggtggaaattgaacggcaaattgccgaatacgccacacaggcacgcaatggcaaattgccgctggaggcgttacagggcggcacgttctctatcaccaacggcggtacttttggttcgatgatgtcaacgccaatcattaacccgccgcagtcggccattcttgggatgcatgccatcacgccgcgcccggtcgcagaaaacggccaggttgttattcgtcccatgatgtaccttgctctcagctatgaccatcgcattatcgatggtcaggaagccgtgcagacattggtggcaatacgtgagctactggaatcaccggaacaactgttgctggatctttaaggagggcgccgatgagtacaatttttgatgtggcagttatggggggggggccaggtggttacgtagcggcactgcgggctgcgcagaatgggctttccgtagtatgtattgatgatggtgttaatgcacagggcgaaccttcgccgggcggtacgtgtctcaatgtcggctgtattccgtcaaaatcgttgctgcaatcttccgaactgtacgcgcaagtgcagcatgaggcgagcattcatggcgttaatgttgacggcgtatctttcaatgcagctgcgatgattcaacgtaaagacgccatagtaagccgcctgacaatgggcatcggcttgctgtttaagaaaaataaagtgaagtacctgtgcggcctcgcaacgttagaacatgctcgggatgagatttggcaattacgtgtaaacgatcaacaaatccgcgcccgtaatgtggtgattgcaacaggttctcagccgcgtcaactgcctggcgttaccattgataatcagcaaattctcgataatcgcggcgccctggcgttaaccgctgtgccgccgcgtctcggtgtgatcggcgctggcgtgattggccttgaactggggtctgtgtggaatcgggtcggttcagacgtcacgttgctggagatggcgccaacgttcttgcctgcactggaagctcgcctgtcgaacgaagtccgtaaagcaatgattgccagtgggatgaaaatgcaactggcagtagagattgaggctattgaacaacgggatgacggtgtgcatgtgcgctggcggcagggtgagaagcgagaagaaagccgcttcgataaattaattcttgccattggacgtgtaccgcgactttctggtgtcgatctcgtgcaactcggtcttgaagccgacaaccgtggcggtattgccgtcgataacttatgccgtaccgggaaagccgggctgtgggcaattggtgatgtcgtgcgagggccgatgctggcgcataaagcgatggctgaaggtgtggtggttgcggatcaaattgccggactggcggtagagccgattaattttgcgctgatcccttcggtgatttacacccaaccggaagttgcgtgggtaggggaaaacgaggcctcactgaaagccgctggcagagtctttaacaaaggaaattctctgtttgccggtaacggtcgcgccttagcattaggccaggaaggtgggcgttgcacgttatacagcgataaacacactgaccgcgtacttggcggagcgattgttggcccgcaggcatccgagctgatcaatgaaattgcgctggcgatgacttttagcgcctctggcgaggatattgcctgtgcgatccatgcgcatccgacattaagcgaagtcatccacgaagcagcaatggccttgaataataaagcattacacggataacacataccactgagggaatatatgaatttacatgagtatcaggccaaatcgttactggctggcatggggatgccgtgtccaaaagagatagccatccaacagatttcgcaactggcagatgcctggcaacatattgcttgcccgagtaaaggcgcggtacttaaagcgcaggtacatgctggtgggcgcggtaaagctggcggcgtaaaagtgcttaagcagctgccggaagcacaggcttttgtacagcaaatgttgggatcgcaactggtgacttatcagaccgggccagaagggcagtatgtcagcagtattttgctgtgcgaaaacatctatccggtacgccaggaactctattttggcatggtggtggatcgtgaaagccagcgggtcacgtttattgtcagcccggaaggtggcgtggaaattgaaaaagtcgcccatgagacaccggagaaaatcagcagtgtcagcattgatccactgacaggcgtgcagccttgccatatccgcgaaatgtttgctgttctgcaactggaacacgggctatttgctgcctttagtcgcctggttaatcaggcgtggaaagcctttaacgaactggatttcgccctgctggaaattaaccctctggtgttgcgggaaacgggcgaatttatgtgtgcagacgcgaaagtatcgctggatgataacgcgctgtatcgtcacccggaactccaggtgctacgtgatgaaacccaggaagatccacgcgaaagccaggcagcgaagcttgatcttaattatgtctcgctggacggaaatatcggctgcatggtcaatggtgcagggctggctatggcaaccatggacatcatcaagctatacggtgaacaacccgcaaacttcctggatgttggcggtggcgcaacccaggagcgcgtcagtgaagcctttcggctgattgtttccgacagcaaagtgaaagccattctggttaatatttttggtgggattgtccgttgcgacatgatcgccagagccattattcatgctctgaatgaggcccgtatcaccctgcctgtcgtggtgcgtctctccggtaataacgctgccgaagggcagcggttactggcagaaagtggcctgacggtggaagccgtcaattctctggatgatgccgctaaacgcatcattgcgttactgaattaacaggaggttaagatgagcgttttgatcaacaaacacacgcgggtactggtgcagggcattaccggcaaaaacggcacatttcatacagagcaggctattgcgtatggcacgcagattgtgggtggagtgacgccaggtaagggcgggcaacggcatctggatcgcccggtttttgattcaatgaaagaagcgatgcgacaaactgaggctgatgccagcgtgatttatgtgcctgcaccgtttgtgctggattctgttgttgaggctattgaagctggcgtcaaattggttgtggtgatcactgaaggtgtaccgacactggatatggtgaaagttcgtcggctgcttgactgccacccggatgtgcggctgattgggccaaactgcccaggagttatcacgccgggcgagtgcaaaatcgggattatgcctggtgaaatccaccgcccagggcgtattgggattgtttcccgctccggtacattaacctacgaagctgtagcgcaaaccacggcgctgggacttgggcaatccacctgtattggtattggcggcgatccggttccggggactaactttattgatgcgctgcgtttattcgaaaatgatccgcaaacagacgcggtaattatgatcggtgaaattggtggtaatgcggaagaacgggccgcggaatttattcgccatgaaatgaataaaccggtcgtaggttatattgccggtgtcactgcaccaaaaggaaaacgcatgggacacgctggagccattatttctggcggtagcggcagtgcggaggataaattccgggcgttcgataaagcaggcatggcatggacacgaaatccagcattacttggcgaaacgttatggaatgttattaagtaatccataaatgaatatcaagggagcatatcgctccctttttttatctgtgtggtaagagaatcaccttttatttactgtgcggaaaaccgcgcacaaaataaaaagaataaataataaaatcattaaataacaaagcgttattaaaaaattaaagatggcatagctcctgcaatagccaggcaggttttttatttttcacaatgaggtgaatatgtcatcaatatcccatggcgcaccacaaaagcgtcgaattatccctaatcccggcctgtggttggcgatcattgccggaattattattacccttctgccactgggcgataccttgcccgtcgctggacaaaatatgatcgccattctggtgtttgccattattgtctggatcagcgaagcgatggattacaccgccagtgcaattgttatttccgcactgattatctttatggttggttttgccccggatatgaatcacccggacacgatccttggcaccgcgaaagcgctgaaaatgactctgtcgggtttttctaattctgctctggcgctggtggcagcagcaatgtttatcgcggcggcaatgaccattaccgggctggataaacgcattgcgctgtttactatgtcgaaaataggtgccagcagccgcagcattattatcggtgccattgtggtgaccatcgtcctgagcctggtcgtacccagtgccactgcccgtacggcttgcgtggtgccgattatgatgggggtcattgcggcatttaaggtggataaacattcacgtttagcggcgtcaatgatgattgttatcgcccaggcgaccagtatctggaacgttggtattcaaacttcggcggcgcaaaacctgctttctatcggttttatcaataaaactttcggcgccgggcattctgtcagctggcttgactggctgttagcgggcgcgccctggagcctcaccatgtcggtgatcctctatttcctcgcacgtaaattgttgccgccagaaacggaagctgttgaaggggggagcgaggccattaaaaaagcactcgcagaattagggccaaccaccggtaaagaaaaacgcttgatcggtatttcgctgttgttactgctcttttggtctactggcggaaaattacacagtattgataccacctctgtcacccttgccggactggcgattatgttgctgccaggcatcggtgtaatgagctggaaagaggtcgaaaaacgtgtgcagtggggcacgttgctgatgtttggtattggtatcagcctggggtccacgctgcttgatacgcaggcagcttcatggatggcgaactatgtggtgaaaggttttggtctcgatggcttgccatcattagccatcttcgcgattctcgccgctttcttgataattattcacctggggtttgccagtgccactgcgctaactgccgcattgctgcccatcctgattagcctgttaagcagtctgccgccagaactcggcgttaacccggtcggcatgaccattctgctcgccttcagtgtcagttttggcttcatcctgccgattaacgcgccacaaaatatggtgtgtatgggtacggataccttcacgccacgccagtttacccgtgtgggactgtacctgacggtaatcggctacctgttgttgctactgtttgccgctacctggtggaaaattttaggtctaatgtgaggaaaccaacgatgtcattacaaattgctgttgaaaaagtgcgttggttagctgccgggctgctggaacttaatggctgtgatgccgatatcgctcaggatgtggcggaacatatgattgaagcggaacgttatggctttgccagccacggcgtcacgctgctaccgaaatatctggaaaatatcgctcgtggcgatgtaaccgcgaatgcccgcccggaatgcttaacaagtgaaggtaatttacaacgttttcatgcccacaatggctttggtcaacacgccggaaaagtggcggtaaatgctgccatcgaacaagcaaaacgccgtggtttttgcctgttaacgttgtgccatgcgcatcatttagggcgtatggggcattacgggcaaatggttgctgatcaaggcctggcgatgctggccatgagtaacgttaccgggcgtccggcgctggtcgcgccctggggcggtgcggaaccgcgtatgaccactaaccctttctgctttgcctggccgttcagtgatgggcgtccgccgattctggttgattttgccaccagtagcatggcgctaaataaagcacgggtaatgtcgtccaccgggaagcaggccgcgccgggacaattgattgatgcacaggggaatccaagcaatgatcctggggtgttattcagcaatcctccaggggcgttactgccatttggtgagcataaaggatttggcctggcactgatgattgaaatgatggcggggatcttatctggtggtgacacgatcgccgaagatcatcagacggatggatctgcgcataatcatctttttgcgttgattatcgatcctgatcaattcaccgatctggcaggggagaaagggcagttctttgcggattatctgttagctacgcagcctcaacctggcggcaatccggtgatttaccccggtatgccagaagctgccaaccgggaacgcaatgcgaagatgattacgatcccggtatcattctggtcctgggtagttgaacattacgcccgcaaaggtatcgatttggggttacatcctcaggaatcagcattagctggatgattctggtcgataaacttgcggttgaatctgatgtttgttgagtttgtcatataaagtcttgcgcggcagctgtaatagccgcgctgtcaaactgacctggccttccgtttgtcgcagcatatcttcgattaactttttctcgaaagcatcaatgcaggcggtaaggccactctcttcttgctgagtcattggcactggctggtggtgggtcagtaaaccgagaacaaaacgctctgcattgtgtttaagttcacgtacattgccaggccaactttgtgattgcaaccaggccagtaacatgggagaaatatcaggcagaggacgattatatttttgtgccgcctgactggcgaaccagtaaaacagttcagggatatcttctcgtcgctggcgtagaggtggaatattcaggctaaccacattcagacgataatagagatcgagacgaaacagatgttcttcgctgcgacgcagtaaatcttccttggtcgctgcaataacacggcaattcaccggaattaattgattggcacctaatcgttcaatggttctttcctgcaatacacgtagcagttttacctgcattcctgatggcattccctctatttcatcgagaaataacgtaccaccatttgcatgttcaatttttccaatacgctttttaaccgcaccggtaaatgcgcccgcctcatgaccaaatatttcgctttcaaacaacgtttctggtaagcctgcacagtttaaggcaacaaactgcccctgacggcgggtactccagtgatgcagcattctggcgacgacttctttaccacaacctgtttcaccataaataaggacatcggcaccggtatctgcgacattaaggatcattttacgcagttgttgcatctgcggactacgaccaatcagcaccgggccattttcctgttgcagattcgccagtaattgctgattttctaaaaccaatcgccgtttttctaccgctctggcaataatactcaataatttatctgagctacttggtttctcaatgaaatcgaatgcaccattacgcatggcatccaccgccatttccacgtcaccgtgtccggtaattaaaataaccggaattttgctatccatttcgttgatgtaactgaggagctctagtcctgatattccaggtaacctgacatcggtcagtataataatgttggcctgactttgaataaggggaatactgtgttctgcatcgcaacaggaaataacacgataaccagccagcgtgagcgtttgttcacaggcaaaacgtacatcgtcactatcctcaatataaactatagtaatttcactggatttattattcatgttcttctccccattcaggccaggttaatgtcattactgcgccgccttcaggatgattactggcgtggagtgcgccgttcgaatttcggacaatttcgctgactattgccagtcccaaccccattcctctacgtttagtggtaaaaaatggttcaaatatgcgatcgacaacttcaggtgcaaaaccgccaccgctgtctttaatggtaataataactttgttatttgcctggcgaatggcgatatccagtcgtttgtaagagctaccttccatagaatctaaggcgttgctaattaaattactgaatatctgttcaagaccgagctcatcgcaattgacaaataacggcatggatggggcttttattcgtcgctcaatgttatttttctccatgctgtgattaagtaacgccacggcgctatacatcactttgatgacatcggcagaacctttaggtacgcgatggcgcgaggcaaatgctttaagttcggaaatgagctgcgtcatccgctcaatcactgaaataatatgtttcagattctgttcaacctgcggatacatctctttttttagcatagtacgcgcgttatcagtaagtgcgtgaatggcggctaacggttgattttgttcatgggcaatttcggttgccatctgtccaagcgccgccagtttgctggactctgccagttcactacgcgtaatttgtaatacttgttcagcttgactgcgctcttttatctcctgtattaatttttgattgatcaattccagggcagatgtacgctctttaacctgtttttctaatgtttcattcgcaagtgttaataattgttgtgcatgagatcgcattctccagtatttaataaataacaaaaacagcaggtaaataattagtgtaatgactaacgaaatagcccatgaccagtacaggttatctaaggggaccataattgtcattttccagttaaattctggaatggctatttgttgcgtataatattgcgggaataaacagagttgttcttttttatctttcaggaaagtaaaattgctcacggtataacagggataataatccgccggtaaaagattgtcgagactatattggcgggtagattgtagtttttgttttgcctgaacaggtaacggttgcagtgttcgcattcgccatggcgattttgaacttaaaaatataatcccatgttcatcattcacgataatattttcaggaccttcggcccatgctttttcaatttcattaagacttatttttactactacaacaccgacaatttttcctttatcttttatacttgtagagaggaagaatcccggtgtattcgtagtgctaccaataccgtaaaagcgtccatttaagccagacatggcgtgtttataataggggcgatagctataattttgccctacatagctgccggggtcctgccagttgctagaagcgatggccttaccttgggtatccagaataaatattgctgcggttttgagttgagtattgaaatgtgcaattcgttgattgagttcgctggacgtcatatcgtcaggcgtaattaccgcctgacggatgatatggtctgttgagagcatatagggtaaaacataaaattgctcgatggtggaatataatgtggacttatacatttcaagccgcattttatcggtactggacaaggtattaaaacgcaagtgcaaaaaagcgattgaaaccgcgagcatgataagaaaaagtgaaatgcttgtaatgtgaaatcgccatttgttcttaaatatataattccacgatattttcattcatcatccattgaatgcatttatatttatcatcagtatattccctgaacaatgtttgcgagaaccaaaagagtgccattgtgtgaatgtgtaagcagaataaccgtggcaatgtgtggtttatcgcacaggtattccaaatgtgatcatgctctttttatgtgacaaat

SEQ ID NO: 491 - DNA, 2736 bp, Escherichia coli
atggagaacatgacctcgcccggcacgctgcttagtggagataacgcgacctggcttgaagagtactaccagacctggttgcgtacgccggaacaactcccggaagactggcggcgtttttttctttcacctgaactgactgtccaaagcgtatccggtgataacaacgtcagcggtgcgacgttaaaaaaacaggctgcggtaatacaactgatcaatgcctggcgcacgcaggggcatctgcgcgcaaagcttgatccacttggtttgaatcccccggctgacgttccctccctccagcctggtttttggggattaagcgaagaagacttgttgcaggaatttagcgtcacctttggcgcacacaccacgcaaatgccacttaagcaactgcttaacctgctggagcaagcctgggcgggtagccaggcttatgaacttgctcatctggaaaatcgtgaagaaatcaactggttgttatcacggattgagagcagcaatgcgccacaagcagatgtacaaacctgtattgctcgttttgaaaaactgatggcggcagagacgttagagcgttatctgcatacccgttatgttgggcagaaacggttttctctggaagggggcgaaagtgcaatcccggcgctcgatacgctgacaaaacgcctgcgtgcgcaaggtgtggaggaaatggtcattggcatggcgcaccggggaagacttaatgttctggttaatctgttgaataaagacccggcacagctttttgctgagtttgaaggcaagcagacgatcggcagtggttcaggcgatgtgaaataccacatggggtattccagcaatctggaaacacctgccggttcgctgcatgtggcgctggcgtataacccctcacatctggagatcgtgaatccggtggtgctgggccaggtgcgagccaggcaggaacgccgtggtgaggatggtcaggcaaaagtggtgggcgtacttattcatggggattccgcgttgggcggcctcggcgtcaaccaaaccacgtttaacttatcgcagactcagggctacggcactggcggtacgctacatctggtgattaacaatcagattggcttcaccacttcccgcttgcaggatatgcgttcttcacggtactgcaccgatattgccaaaatggtagcggccccaattatccacgttaatggcgatgacgttgacgctgtttgccaggtaatggaactggcgtgcgaatggcgagacaccttccggcgcgacatcatcatcgatatttgctgcttccgtaagcacggacacaacgaaagcgatgagccacgtcttacccagccacaaatgtatcaggcagtggatgctcaccctggtacgctcgcccgttatggtgaatctcttgcccgccgcggcctgttaactcaggcgcaacaagatgagatgacggcacgcgactggctggatagctgccagaaacgtgaaccgcagcctctcaaacctgcaattcactcttttagcgctaactggtatgggttgaccaaccctcactggagcgccccggtatctacggcattgcctcggcaaaagctggcagcgtatggtgaaatcatttctacgctgccacccgatgtggtcgcacatcctaccattaaacggcaactggcgttacgccaggatatggccgcaggtactcagccaatagactggggaatggctgaaatgctggcctatgcatcgcttgtggatgcgggtgttggtgtgcgtctttctggtgaagactcagggcgtggcacgttcagtcatcgccatgcagtggtacatcatcaaactgaagcccgtcgttatctgccgttacagcatatccgcgctggtcaggcatctttcgatgtttatgattcggtgcttaatgaagaagcgctcttagcctttgaatatggctattcaacgtctgcgcctcagcaactggttatttgggaagcacagtttggtgactttgccaacggcgctcaggttgctattgaccagtttatctcgtctggcgaaaccaagtgggatcgctatagcgggttaaccattcttctgccgcatggctatgacggacaagggccggagcactcttctgcgcgtcctgagcgctggctgcaactgtgcgcagaaaacaacatgcaggtggtgatgcccagtgagtcagcacaaatgttccatttgttgcgcggtcaggcattacgcccaatgcgcaaaccgttagtgataatgatgagtaagcgtttacttcggtttaaaggcgctatgagcgagctttgtgaattcactgatggcgcttataaaccggtaatcaccgatccgcaattgcatcagtcccagaaagttaagcgcgttattttgtgtagcggccaggtctattacgacgtactggaagcccgtaagcagcgtgagcatgaagacgaagtggcgattgttcgcctggagcaactctacccgttcccggtcgcagaactgaatgatgttctggcgagttggccgaactgctgcgaatggatttggttgcaggaagagccagaaaaccagggcgcgtggcggcagattcgtcatgagctggcggcactgaaaattaacactccttactggcagtatgcaggccgcccggcagcggcagctccggcgacagggtatgggcgtgtacataaacaacaaatcgacgaatttcttgctgctgcgtttgcagatattcagcca

SEQ ID NO: 492 - protein, 912 aa, Escherichia coli
MENMTSPGTLLSGDNATWLEEYYQTWLRTPEQLPEDWRRFFLSPELTVQSVSGDNNVSGATLKKQAAVIQLINAWRTQGHLRAKLDPLGLNPPADVPSLQPGFWGLSEEDLLQEFSVTFGAHTTQMPLKQLLNLLEQAWAGSQAYELAHLENREEINWLLSRIESSNAPQADVQTCIARFEKLMAAETLERYLHTRYVGQKRFSLEGGESAIPALDTLTKRLRAQGVEEMVIGMAHRGRLNVLVNLLNKDPAQLFAEFEGKQTIGSGSGDVKYHMGYSSNLETPAGSLHVALAYNPSHLEIVNPVVLGQVRARQERRGEDGQAKVVGVLIHGDSALGGLGVNQTTFNLSQTQGYGTGGTLHLVINNQIGFTTSRLQDMRSSRYCTDIAKMVAAPIIHVNGDDVDAVCQVMELACEWRDTFRRDIIIDICCFRKHGHNESDEPRLTQPQMYQAVDAHPGTLARYGESLARRGLLTQAQQDEMTARDWLDSCQKREPQPLKPAIHSFSANWYGLTNPHWSAPVSTALPRQKLAAYGEIISTLPPDVVAHPTIKRQLALRQDMAAGTQPIDWGMAEMLAYASLVDAGVGVRLSGEDSGRGTFSHRHAVVHHQTEARRYLPLQHIRAGQASFDVYDSVLNEEALLAFEYGYSTSAPQQLVIWEAQFGDFANGAQVAIDQFISSGETKWDRYSGLTILLPHGYDGQGPEHSSARPERWLQLCAENNMQVVMPSESAQMFHLLRGQALRPMRKPLVIMMSKRLLRFKGAMSELCEFTDGAYKPVITDPQLHQSQKVKRVILCSGQVYYDVLEARKQREHEDEVAIVRLEQLYPFPVAELNDVLASWPNCCEWIWLQEEPENQGAWRQIRHELAALKINTPYWQYAGRPAAAAPATGYGRVHKQQIDEFLAAAFADIQP

SEQ ID NO: 493 - DNA, 1419 bp, Escherichia coli
atgagtacaatttttgatgtggcagttatggggggggggccaggtggttacgtagcggcactgcgggctgcgcagaatgggctttccgtagtatgtattgatgatggtgttaatgcacagggcgaaccttcgccgggcggtacgtgtctcaatgtcggctgtattccgtcaaaatcgttgctgcaatcttccgaactgtacgcgcaagtgcagcatgaggcgagcattcatggcgttaatgttgacggcgtatctttcaatgcagctgcgatgattcaacgtaaagacgccatagtaagccgcctgacaatgggcatcggcttgctgtttaagaaaaataaagtgaagtacctgtgcggcctcgcaacgttagaacatgctcgggatgagatttggcaattacgtgtaaacgatcaacaaatccgcgcccgtaatgtggtgattgcaacaggttctcagccgcgtcaactgcctggcgttaccattgataatcagcaaattctcgataatcgcggcgccctggcgttaaccgctgtgccgccgcgtctcggtgtgatcggcgctggcgtgattggccttgaactggggtctgtgtggaatcgggtcggttcagacgtcacgttgctggagatggcgccaacgttcttgcctgcactggaagctcgcctgtcgaacgaagtccgtaaagcaatgattgccagtgggatgaaaatgcaactggcagtagagattgaggctattgaacaacgggatgacggtgtgcatgtgcgctggcggcagggtgagaagcgagaagaaagccgcttcgataaattaattcttgccattggacgtgtaccgcgactttctggtgtcgatctcgtgcaactcggtcttgaagccgacaaccgtggcggtattgccgtcgataacttatgccgtaccgggaaagccgggctgtgggcaattggtgatgtcgtgcgagggccgatgctggcgcataaagcgatggctgaaggtgtggtggttgcggatcaaattgccggactggcggtagagccgattaattttgcgctgatcccttcggtgatttacacccaaccggaagttgcgtgggtaggggaaaacgaggcctcactgaaagccgctggcagagtctttaacaaaggaaattctctgtttgccggtaacggtcgcgccttagcattaggccaggaaggtgggcgttgcacgttatacagcgataaacacactgaccgcgtacttggcggagcgattgttggcccgcaggcatccgagctgatcaatgaaattgcgctggcgatgacttttagcgcctctggcgaggatattgcctgtgcgatccatgcgcatccgacattaagcgaagtcatccacgaagcagcaatggccttgaataataaagcattacacggataa

SEQ ID NO: 494 - protein, 472 aa, Escherichia coli
MSTIFDVAVMGGGPGGYVAALRAAQNGLSVVCIDDGVNAQGEPSPGGTCLNVGCIPSKSLLQSSELYAQVQHEASIHGVNVDGVSFNAAAMIQRKDAIVSRLTMGIGLLFKKNKVKYLCGLATLEHARDEIWQLRVNDQQIRARNVVIATGSQPRQLPGVTIDNQQILDNRGALALTAVPPRLGVIGAGVIGLELGSVWNRVGSDVTLLEMAPTFLPALEARLSNEVRKAMIASGMKMQLAVEIEAIEQRDDGVHVRWRQGEKREESRFDKLILAIGRVPRLSGVDLVQLGLEADNRGGIAVDNLCRTGKAGLWAIGDVVRGPMLAHKAMAEGVVVADQIAGLAVEPINFALIPSVIYTQPEVAWVGENEASLKAAGRVFNKGNSLFAGNGRALALGQEGGRCTLYSDKHTDRVLGGAIVGPQASELINEIALAMTFSASGEDIACAIHAHPTLSEVIHEAAMALNNKALHG

SEQ ID NO: 495 - DNA, 1167 bp, Escherichia coli
atgaatttacatgagtatcaggccaaatcgttactggctggcatggggatgccgtgtccaaaagagatagccatccaacagatttcgcaactggcagatgcctggcaacatattgcttgcccgagtaaaggcgcggtacttaaagcgcaggtacatgctggtgggcgcggtaaagctggcggcgtaaaagtgcttaagcagctgccggaagcacaggcttttgtacagcaaatgttgggatcgcaactggtgacttatcagaccgggccagaagggcagtatgtcagcagtattttgctgtgcgaaaacatctatccggtacgccaggaactctattttggcatggtggtggatcgtgaaagccagcgggtcacgtttattgtcagcccggaaggtggcgtggaaattgaaaaagtcgcccatgagacaccggagaaaatcagcagtgtcagcattgatccactgacaggcgtgcagccttgccatatccgcgaaatgtttgctgttctgcaactggaacacgggctatttgctgcctttagtcgcctggttaatcaggcgtggaaagcctttaacgaactggatttcgccctgctggaaattaaccctctggtgttgcgggaaacgggcgaatttatgtgtgcagacgcgaaagtatcgctggatgataacgcgctgtatcgtcacccggaactccaggtgctacgtgatgaaacccaggaagatccacgcgaaagccaggcagcgaagcttgatcttaattatgtctcgctggacggaaatatcggctgcatggtcaatggtgcagggctggctatggcaaccatggacatcatcaagctatacggtgaacaacccgcaaacttcctggatgttggcggtggcgcaacccaggagcgcgtcagtgaagcctttcggctgattgtttccgacagcaaagtgaaagccattctggttaatatttttggtgggattgtccgttgcgacatgatcgccagagccattattcatgctctgaatgaggcccgtatcaccctgcctgtcgtggtgcgtctctccggtaataacgctgccgaagggcagcggttactggcagaaagtggcctgacggtggaagccgtcaattctctggatgatgccgctaaacgcatcattgcgttactgaat

SEQ ID NO: 496 - protein, 389 aa, Escherichia coli
MNLHEYQAKSLLAGMGMPCPKEIAIQQISQLADAWQHIACPSKGAVLKAQVHAGGRGKAGGVKVLKQLPEAQAFVQQMLGSQLVTYQTGPEGQYVSSILLCENIYPVRQELYFGMVVDRESQRVTFIVSPEGGVEIEKVAHETPEKISSVSIDPLTGVQPCHIREMFAVLQLEHGLFAAFSRLVNQAWKAFNELDFALLEINPLVLRETGEFMCADAKVSLDDNALYRHPELQVLRDETQEDPRESQAAKLDLNYVSLDGNIGCMVNGAGLAMATMDIIKLYGEQPANFLDVGGGATQERVSEAFRLIVSDSKVKAILVNIFGGIVRCDMIARAIIHALNEARITLPVVVRLSGNNAAEGQRLLAESGLTVEAVNSLDDAAKRIIALLN

SEQ ID NO: 497 - DNA, 873 bp, Escherichia coli
atgagcgttttgatcaacaaacacacgcgggtactggtgcagggcattaccggcaaaaacggcacatttcatacagagcaggctattgcgtatggcacgcagattgtgggtggagtgacgccaggtaagggcgggcaacggcatctggatcgcccggtttttgattcaatgaaagaagcgatgcgacaaactgaggctgatgccagcgtgatttatgtgcctgcaccgtttgtgctggattctgttgttgaggctattgaagctggcgtcaaattggttgtggtgatcactgaaggtgtaccgacactggatatggtgaaagttcgtcggctgcttgactgccacccggatgtgcggctgattgggccaaactgcccaggagttatcacgccgggcgagtgcaaaatcgggattatgcctggtgaaatccaccgcccagggcgtattgggattgtttcccgctccggtacattaacctacgaagctgtagcgcaaaccacggcgctgggacttgggcaatccacctgtattggtattggcggcgatccggttccggggactaactttattgatgcgctgcgtttattcgaaaatgatccgcaaacagacgcggtaattatgatcggtgaaattggtggtaatgcggaagaacgggccgcggaatttattcgccatgaaatgaataaaccggtcgtaggttatattgccggtgtcactgcaccaaaaggaaaacgcatgggacacgctggagccattatttctggcggtagcggcagtgcggaggataaattccgggcgttcgataaagcaggcatggcatggacacgaaatccagcattacttggcgaaacgttatggaatgttattaagtaa

SEQ ID NO: 498 - protein, 290 aa, Escherichia coli
MSVLINKHTRVLVQGITGKNGTFHTEQAIAYGTQIVGGVTPGKGGQRHLDRPVFDSMKEAMRQTEADASVIYVPAPFVLDSVVEAIEAGVKLVVVITEGVPTLDMVKVRRLLDCHPDVRLIGPNCPGVITPGECKIGIMPGEIHRPGRIGIVSRSGTLTYEAVAQTTALGLGQSTCIGIGGDPVPGTNFIDALRLFENDPQTDAVIMIGEIGGNAEERAAEFIRHEMNKPVVGYIAGVTAPKGKRMGHAGAIISGGSGSAEDKFRAFDKAGMAWTRNPALLGETLWNVIK

SEQ ID NO: 499 - DNA, 1497 bp, Escherichia coli
atgtcatcaatatcccatggcgcaccacaaaagcgtcgaattatccctaatcccggcctgtggttggcgatcattgccggaattattattacccttctgccactgggcgataccttgcccgtcgctggacaaaatatgatcgccattctggtgtttgccattattgtctggatcagcgaagcgatggattacaccgccagtgcaattgttatttccgcactgattatctttatggttggttttgccccggatatgaatcacccggacacgatccttggcaccgcgaaagcgctgaaaatgactctgtcgggtttttctaattctgctctggcgctggtggcagcagcaatgtttatcgcggcggcaatgaccattaccgggctggataaacgcattgcgctgtttactatgtcgaaaataggtgccagcagccgcagcattattatcggtgccattgtggtgaccatcgtcctgagcctggtcgtacccagtgccactgcccgtacggcttgcgtggtgccgattatgatgggggtcattgcggcatttaaggtggataaacattcacgtttagcggcgtcaatgatgattgttatcgcccaggcgaccagtatctggaacgttggtattcaaacttcggcggcgcaaaacctgctttctatcggttttatcaataaaactttcggcgccgggcattctgtcagctggcttgactggctgttagcgggcgcgccctggagcctcaccatgtcggtgatcctctatttcctcgcacgtaaattgttgccgccagaaacggaagctgttgaaggggggagcgaggccattaaaaaagcactcgcagaattagggccaaccaccggtaaagaaaaacgcttgatcggtatttcgctgttgttactgctcttttggtctactggcggaaaattacacagtattgataccacctctgtcacccttgccggactggcgattatgttgctgccaggcatcggtgtaatgagctggaaagaggtcgaaaaacgtgtgcagtggggcacgttgctgatgtttggtattggtatcagcctggggtccacgctgcttgatacgcaggcagcttcatggatggcgaactatgtggtgaaaggttttggtctcgatggcttgccatcattagccatcttcgcgattctcgccgctttcttgataattattcacctggggtttgccagtgccactgcgctaactgccgcattgctgcccatcctgattagcctgttaagcagtctgccgccagaactcggcgttaacccggtcggcatgaccattctgctcgccttcagtgtcagttttggcttcatcctgccgattaacgcgccacaaaatatggtgtgtatgggtacggataccttcacgccacgccagtttacccgtgtgggactgtacctgacggtaatcggctacctgttgttgctactgtttgccgctacctggtggaaaattttaggtctaatg

SEQ ID NO: 500 - protein, 499 aa, Escherichia coli
MSSISHGAPQKRRIIPNPGLWLAIIAGIIITLLPLGDTLPVAGQNMIAILVFAIIVWISEAMDYTASAIVISALIIFMVGFAPDMNHPDTILGTAKALKMTLSGFSNSALALVAAAMFIAAAMTITGLDKRIALFTMSKIGASSRSIIIGAIVVTIVLSLVVPSATARTACVVPIMMGVIAAFKVDKHSRLAASMMIVIAQATSIWNVGIQTSAAQNLLSIGFINKTFGAGHSVSWLDWLLAGAPWSLTMSVILYFLARKLLPPETEAVEGGSEAIKKALAELGPTTGKEKRLIGISLLLLLFWSTGGKLHSIDTTSVTLAGLAIMLLPGIGVMSWKEVEKRVQWGTLLMFGIGISLGSTLLDTQAASWMANYVVKGFGLDGLPSLAIFAILAAFLIIIHLGFASATALTAALLPILISLLSSLPPELGVNPVGMTILLAFSVSFGFILPINAPQNMVCMGTDTFTPRQFTRVGLYLTVIGYLLLLLFAATWWKILGLM

SEQ ID NO: 501 - DNA, 1071 bp, Escherichia coli
atgtcattacaaattgctgttgaaaaagtgcgttggttagctgccgggctgctggaacttaatggctgtgatgccgatatcgctcaggatgtggcggaacatatgattgaagcggaacgttatggctttgccagccacggcgtcacgctgctaccgaaatatctggaaaatatcgctcgtggcgatgtaaccgcgaatgcccgcccggaatgcttaacaagtgaaggtaatttacaacgttttcatgcccacaatggctttggtcaacacgccggaaaagtggcggtaaatgctgccatcgaacaagcaaaacgccgtggtttttgcctgttaacgttgtgccatgcgcatcatttagggcgtatggggcattacgggcaaatggttgctgatcaaggcctggcgatgctggccatgagtaacgttaccgggcgtccggcgctggtcgcgccctggggcggtgcggaaccgcgtatgaccactaaccctttctgctttgcctggccgttcagtgatgggcgtccgccgattctggttgattttgccaccagtagcatggcgctaaataaagcacgggtaatgtcgtccaccgggaagcaggccgcgccgggacaattgattgatgcacaggggaatccaagcaatgatcctggggtgttattcagcaatcctccaggggcgttactgccatttggtgagcataaaggatttggcctggcactgatgattgaaatgatggcggggatcttatctggtggtgacacgatcgccgaagatcatcagacggatggatctgcgcataatcatctttttgcgttgattatcgatcctgatcaattcaccgatctggcaggggagaaagggcagttctttgcggattatctgttagctacgcagcctcaacctggcggcaatccggtgatttaccccggtatgccagaagctgccaaccgggaacgcaatgcgaagatgattacgatcccggtatcattctggtcctgggtagttgaacattacgcccgcaaaggtatcgatttggggttacatcctcaggaatcagcattagctgga

SEQ ID NO: 502 - protein, 357 aa, Escherichia coli
MSLQIAVEKVRWLAAGLLELNGCDADIAQDVAEHMIEAERYGFASHGVTLLPKYLENIARGDVTANARPECLTSEGNLQRFHAHNGFGQHAGKVAVNAAIEQAKRRGFCLLTLCHAHHLGRMGHYGQMVADQGLAMLAMSNVTGRPALVAPWGGAEPRMTTNPFCFAWPFSDGRPPILVDFATSSMALNKARVMSSTGKQAAPGQLIDAQGNPSNDPGVLFSNPPGALLPFGEHKGFGLALMIEMMAGILSGGDTIAEDHQTDGSAHNHLFALIIDPDQFTDLAGEKGQFFADYLLATQPQPGGNPVIYPGMPEAANRERNAKMITIPVSFWSWVVEHYARKGIDLGLHPQESALAG

SEQ ID NO: 503 - DNA, 1353 bp, Escherichia coli
atgaataataaatccagtgaaattactatagtttatattgaggatagtgacgatgtacgttttgcctgtgaacaaacgctcacgctggctggttatcgtgttatttcctgttgcgatgcagaacacagtattccccttattcaaagtcaggccaacattattatactgaccgatgtcaggttacctggaatatcaggactagagctcctcagttacatcaacgaaatggatagcaaaattccggttattttaattaccggacacggtgacgtggaaatggcggtggatgccatgcgtaatggtgcattcgatttcattgagaaaccaagtagctcagataaattattgagtattattgccagagcggtagaaaaacggcgattggttttagaaaatcagcaattactggcgaatctgcaacaggaaaatggcccggtgctgattggtcgtagtccgcagatgcaacaactgcgtaaaatgatccttaatgtcgcagataccggtgccgatgtccttatttatggtgaaacaggttgtggtaaagaagtcgtcgccagaatgctgcatcactggagtacccgccgtcaggggcagtttgttgccttaaactgtgcaggcttaccagaaacgttgtttgaaagcgaaatatttggtcatgaggcgggcgcatttaccggtgcggttaaaaagcgtattggaaaaattgaacatgcaaatggtggtacgttatttctcgatgaaatagagggaatgccatcaggaatgcaggtaaaactgctacgtgtattgcaggaaagaaccattgaacgattaggtgccaatcaattaattccggtgaattgccgtgttattgcagcgaccaaggaagatttactgcgtcgcagcgaagaacatctgtttcgtctcgatctctattatcgtctgaatgtggttagcctgaatattccacctctacgccagcgacgagaagatatccctgaactgttttactggttcgccagtcaggcggcacaaaaatataatcgtcctctgcctgatatttctcccatgttactggcctggttgcaatcacaaagttggcctggcaatgtacgtgaacttaaacacaatgcagagcgttttgttctcggtttactgacccaccaccagccagtgccaatgactcagcaagaagagagtggccttaccgcctgcattgatgctttcgagaaaaagttaatcgaagatatgctgcgacaaacggaaggccaggtcagtttgacagcgcggctattacagctgccgcgcaagactttatatgacaaactcaacaaacatcagattcaaccgcaagtttatcgaccagaatcatcc

SEQ ID NO: 504 - protein, 452 aa, Escherichia coli
MNNKSSEITIVYIEDSDDVRFACEQTLTLAGYRVISCCDAEHSIPLIQSQANIIILTDVRLPGISGLELLSYINEMDSKIPVILITGHGDVEMAVDAMRNGAFDFIEKPSSSDKLLSIIARAVEKRRLVLENQQLLANLQQENGPVLIGRSPQMQQLRKMILNVADTGADVLIYGETGCGKEVVARMLHHWSTRRQGQFVALNCAGLPETLFESEIFGHEAGAFTGAVKKRIGKIEHANGGTLFLDEIEGMPSGMQVKLLRVLQERTIERLGANQLIPVNCRVIAATKEDLLRRSEEHLFRLDLYYRLNVVSLNIPPLRQRREDIPELFYWFASQAAQKYNRPLPDISPMLLAWLQSQSWPGNVRELKHNAERFVLGLLTHHQPVPMTQQEESGLTACIDAFEKKLIEDMLRQTEGQVSLTARLLQLPRKTLYDKLNKHQIQPQVYRPESSS

SEQ ID NO: 505 - DNA, 1818 bp, Escherichia coli
atgaaaatatcgtggaattatatatttaagaacaaatggcgatttcacattacaagcatttcactttttcttatcatgctcgcggtttcaatcgcttttttgcacttgcgttttaataccttgtccagtaccgataaaatgcggcttgaaatgtataagtccacattatattccaccatcgagcaattttatgttttaccctatatgctctcaacagaccatatcatccgtcaggcggtaattacgcctgacgatatgacgtccagcgaactcaatcaacgaattgcacatttcaatactcaactcaaaaccgcagcaatatttattctggatacccaaggtaaggccatcgcttctagcaactggcaggaccccggcagctatgtagggcaaaattatagctatcgcccctattataaacacgccatgtctggcttaaatggacgcttttacggtattggtagcactacgaatacaccgggattcttcctctctacaagtataaaagataaaggaaaaattgtcggtgttgtagtagtaaaaataagtcttaatgaaattgaaaaagcatgggccgaaggtcctgaaaatattatcgtgaatgatgaacatgggattatatttttaagttcaaaatcgccatggcgaatgcgaacactgcaaccgttacctgttcaggcaaaacaaaaactacaatctacccgccaatatagtctcgacaatcttttaccggcggattattatccctgttataccgtgagcaattttactttcctgaaagataaaaaagaacaactctgtttattcccgcaatattatacgcaacaaatagccattccagaatttaactggaaaatgacaattatggtccccttagataacctgtactggtcatgggctatttcgttagtcattacactaattatttacctgctgtttttgttatttattaaatactggagaatgcgatctcatgcacaacaattattaacacttgcgaatgaaacattagaaaaacaggttaaagagcgtacatctgccctggaattgatcaatcaaaaattaatacaggagataaaagagcgcagtcaagctgaacaagtattacaaattacgcgtagtgaactggcagagtccagcaaactggcggcgcttggacagatggcaaccgaaattgcccatgaacaaaatcaaccgttagccgccattcacgcacttactgataacgcgcgtactatgctaaaaaaagagatgtatccgcaggttgaacagaatctgaaacatattatttcagtgattgagcggatgacgcagctcatttccgaacttaaagcatttgcctcgcgccatcgcgtacctaaaggttctgccgatgtcatcaaagtgatgtatagcgccgtggcgttacttaatcacagcatggagaaaaataacattgagcgacgaataaaagccccatccatgccgttatttgtcaattgcgatgagctcggtcttgaacagatattcagtaatttaattagcaacgccttagattctatggaaggtagctcttacaaacgactggatatcgccattcgccaggcaaataacaaagttattattaccattaaagacagcggtggcggttttgcacctgaagttgtcgatcgcatatttgaaccattttttaccactaaacgtagaggaatggggttgggactggcaatagtcagcgaaattgtccgaaattcgaacggcgcactccacgccagtaatcatcctgaaggcggcgcagtaatgacattaacctggcctgaatggggagaagaacatgaa

SEQ ID NO: 506 - protein, 606 aa, Escherichia coli
MKISWNYIFKNKWRFHITSISLFLIMLAVSIAFLHLRFNTLSSTDKMRLEMYKSTLYSTIEQFYVLPYMLSTDHIIRQAVITPDDMTSSELNQRIAHFNTQLKTAAIFILDTQGKAIASSNWQDPGSYVGQNYSYRPYYKHAMSGLNGRFYGIGSTTNTPGFFLSTSIKDKGKIVGVVVVKISLNEIEKAWAEGPENIIVNDEHGIIFLSSKSPWRMRTLQPLPVQAKQKLQSTRQYSLDNLLPADYYPCYTVSNFTFLKDKKEQLCLFPQYYTQQIAIPEFNWKMTIMVPLDNLYWSWAISLVITLIIYLLFLLFIKYWRMRSHAQQLLTLANETLEKQVKERTSALELINQKLIQEIKERSQAEQVLQITRSELAESSKLAALGQMATEIAHEQNQPLAAIHALTDNARTMLKKEMYPQVEQNLKHIISVIERMTQLISELKAFASRHRVPKGSADVIKVMYSAVALLNHSMEKNNIERRIKAPSMPLFVNCDELGLEQIFSNLISNALDSMEGSSYKRLDIAIRQANNKVIITIKDSGGGFAPEVVDRIFEPFFTTKRRGMGLGLAIVSEIVRNSNGALHASNHPEGGAVMTLTWPEWGEEHE

SEQ ID NO: 507 - DNA, 12264 bp, Escherichia coli
cagggcttcatactctgcatccctgtcccggctctcgcccaccccgggcaggtcagtgataaccatgctgtgaccgtggccactcagacggaagcgccgcacttcccgggtgccagcgtgaacatcactgaccggggtgacctccccctgaaacagtgcattacagagtgaggatttaccggccccgcttttccccataatgccaatcacgggttcgtggctggtgagtttgcgcagatgttccaggatgtgacgggaaagtgaataaggcagggaggagagcggtttttcaattgcctcaatggcatcagacggattcatacatgtattcccggtaaaaaaagacaaaaccccgcgcaccggaaaggtggcgggggattcacggagataatatctgtctgaaattatttaggatgtgccagacatacagcaaaggagagaagtattcggccacgcctccctgccatgaataacccggagtccaccgacttacttacgggctacctgagccacgcgtttgctgtagaatagcccctgatgattcatacctgaaccaggaaaacgaattaaaaatgacaggcattcaataacgagcagggctgcaacacctgatagggcaaatggtcaatgatgtcagagggtctgtcgacggatgggattttaaacagtacattttgggcgcacttttcaaccgttttatcagcgaaaatttttccagctatatggaatattgtcgatcaagatgttgtaaaaagatccagaaaaaatatttcaaaggcatgaaagaacttgctgacaagaagtttattgcagagaccatgatacagaactattactttattaacccaggctatatgtttaatggtcatcgcttgacctatatgaagacctattacctgaaggataaaaacgaataaataataatagagagattcctgtgaagtaatttcatattaattatcaaatggtaactaactatttaataatacatggcgaatggactgttttaattaatatattagctcagacttaacctgagacagctatgacacaaaagccagagctattttgatggtttgggtttgctctgccctaagagcaggtatgatgggtaacagtctggtcctctactactgtgcttacaccacaacatttacgttgtgtgttaacatgtagcgatttactgactcttttgagtggtaccgttatgtctcaaatgcccctctattttcttaatacccaaaagaaactcactgctcactatgaatggcttcaaatcaacctgactgatacctacgaactagttaaaaggttaatgccgattccttcactggacgtggtggttaaagtagggaaacttgtcctcccggagaaagggcatcatggtttttaccctgaagctggagttgtctatagaacagtagctccagaaaatccataattttgcaaaaattatgcgcactccattgctcgaatgtttgcacatgaactgcatcgtgctgttagatgggccgagatacggctcaactttaggagaagtcatagtctctgaagggcttgcagggcacttttcgcttgagctttttgctggtgaacctgaccccagagaaaaactcacatcagatattgttcaaccgtacaggctgcatttgcttgaaaactggtatagtactgattacgattgtaacgcttggttgttcggaaccggggacttgccaagatggctggaatataccaaaggttttaaactgatttccagatacctcgtacattcccacatttaaaggcttcaatgctggcgaatataaacactgaggagttaaagacatttatttaaagagcacagccattttccagaactatgactgtgatcatgggcaaaacccaaatggcccactcatagcggcctatcagagttaatggctttcagtttgcggaaactgcctacttgaatccatatgtaccctatttcatatcattaaggtatataatatgacatttagatactatctcagacattgtttatggggcttagtcggttgtggctctttggtttacaacattttgactgatttaaaggatggaaagatatttccttcttatattccttatataccttatgttgcagcataccttgctattggtgctgtagcatacccgtttgcatattatgctttagaaatatcagcgcaaaagataataccaaagaaatcctgggatagattttttagtgatactggatcatcaaggaatttattcttattcgtattaatgttttgtatattatttatcgtacctctactcgcattatatttttgcatatcaaaaaaacataataaattacaaacctaaaattacatttaattatgctccctaaaaacagtttaagttattatcaataaagttagcaatcttcttaatacctatttttaaatacccgaagctaaaaatctaggttcagctaagtataactctattggacggtaaacctgaacgggctggcaacagggacaatgaaggttaactgtgaccatggaagaaccttaaaagcgactattatacccctaattcaactaattggaggtattaccatctattgatactgataattctaaaaaggcatggacagctcagggccaaactccgaaaacaacaatagctactatcggatctgttaaaacattggtaaattttgcataattataaatacaatgtgtttaacgccctgaaataaaacaattgatgcgtctattctttaagttaataaggtcagaaaaatttcaacttattcatttaataatttcccgtttagagtgtaagtacagcacttacataatattggtatgcctgatgcctttaaatctggagaaaacatttcaagtaaccattctcatcaacatacagcccattgtaataactggatttgccgcaccgaacaaaatttctttggtctgtttcgtgtagagcaactagaaagaaggttggatcaggcagatcgagtcgtagaatcgcttcactataaacttgatccgatttttcacctgtttttcttagtagaaacatgaataatggtgaataatcaagcccatagtttattttacctgacataggtaaaatgtatggatgctcagaattaactcttttattcttactccgcccccaatgatattctccaccatgtaagtgtgggacattataattaattaaatttacagggcaatatcagtttttttcacacttgtttttcctgtaattgctcataactatttatctacacttatattaattttttattcgtcagactggggtatttgatatttcaggtcgatttcaggtgcatcaactagttgcctaccggatcgaaccatcaaatagcatgcaatctcttcaacactcagttcaacatctaacatatctggatcctgaaaccattcatcgggccagaatataagatcggatggatttccatgaaaattcttttcaagcaacaaaagagcaaaaattttttccgattcgtttgacttttgatcacatacacagcttatcgtttgaaccagttcctcccaagtaaaatcctcgtagaacttttccaaattaaaagctattcgtgtaaattcatttgcatttgtccaagaggaataatctctaaaatctgaaaactcacatggacatactacctgactgttccagtcatcgatcatgtcctttaaaaaagcatcttcttcacttgctccactatcaatagctgcaagtatctctttagctttctgtgctaattctcttatttttttgctgctgacttttacggggatcatacgttcagggattgccattaattcacaacctcatataataaatattataatatctatttgtataataactcttttaaccgttcacaacctttcttaagcccattattacatgaccgctcatagtaatgtcttgcttgtttcaggtctatgctttcaccctgacccagttcattcataacgccaagttcgaactgcgcctgcgcatcattttgtgaggctgccttttcataccaagcctttgcctgttgatagttctgactcacaccttcaccattttcgtatattacaccgagattatattgagcatcgacatgacctttctctgccgctttttcaaaccagtctttcgcctgtcgatagctctgagtcacaccctgaccgtagtaataaatctgacctaaattatattgggcattcggctgattttgagatgcggctttttcaaaccattctctggcttgccgaaagttttgtttaacaccctcacctttgtaatagagcataccaagattaaactgagcattggcgaaattttgttctgctgctttctcataccagtcttttgcctgctgatagtcctgctctacaccattagcattggcatacagaattccaagagcgaactgcgcatcaggactattttgagctgcagccttttcataccagcttttggcctgtcgataatcctgttcaacaccattaccctttgcgtatagaacagcgagattgacctgagcacgctcatcattttgagcagccgctttttcataccacatctttgcatgctggtagtcttggcttaccccgagaccatcgtcatacatctccccaagcaaaaattgcgcatcaacatcattttgcgcagccgccttttcataccataattttgattgctgataatcctgatttaccccgagaccatttgcatacatcacaccgagtttggcctgcgcacgcggatcattttggtcagcggctttttcataccaaatctttgcctgctgataatcaacatccagaatttctccatacaaatacatgagccccaaagcatactgagcttctacatctccgttttcacctgctgatttcaacctagaaagcgtagaatccctgtcactaatagcaatgtaaaaaatcgcaaaaagtataataaatcctactattagccaatattttatttttcccatctcacccccagtccatttaaaaagtatatagcctctacaacgatctttactccagactgtcccagtctggaagattgttaactacctttcgacactaatggtacacagccatgagaacaccaaagcaaatgcctgcgactatgcttgagacaaatgcaacgcccggttgcataccactgtctttccatgaagaaaaccacatacaaatccccacaacgtaccaaaccatacccccatcagcaaggttatttccagaacgaggcaaacggtagcggttgcatcccgatgatcatttttgatcctgtctatcggtgattttactatctgggaagaggcaataacctagcattttatattcatcgctgtgagttgatgatatagcccaaaaccacaggggccagcttcatagcaggaaagaatgtttccgtaaagtccctgcaatttctgaaataatcgacgtacagactgggcttcgttgttaatcgtaccataccataataacgaaccttgccaagtcgttcagatgcaacaatagcaactgctagggggctttatgcacatccagcccgacgtaagccgcaatattttccgaatacatgatgacctcctctggaatatcccaccaatgctatagtgagtatataaaggtcatatcatctacatgttcttcggcaacgatcacggtggagagcgtagtgcgctgctgtacgggctgatcggcgcctgccgactgaacggtatcgatccggaatcgtatctgcgccatatcctcaacgtcctgccggaatggccttctaaccgtgttgatgaactcctgccatggaacgtcgtactcacccaataaataaacgtcaatacggcgctccgtgaacgtttacccaaatcatgatcgattcgaatgccaaactacgatcgattcatatgccatatttgcaatatcgcgttaatcatcagttcagccgggatatattaacgggccagggatccgcgaaaacgccacctgattgccaccagacaatttcttcttcagaaagaaaacagttaattaaggcggaggtaaaatcatggacttcatcagaacgccctataatcgttaaatggcatctcctgtctccaaaccgccccatagttttattgacttttttctgcaaaacagagcgctcttcgtgggtcaggtgattatcagggtctgccaatacaccggaattccagtagctgataaactccagattgatacttcctgcggcctggttccagagcagagccatgtcaggtcttcctggtagccagaaaaagcctttactacgataaatacccattcccataaaataatgataggtttcccataatctttgtgggtggaatggcctgtcatctttaatcactcgcgaaattatttcgccattttgggctgaaatttttgcttcttctactgtgattgtgtcttccagttctctgataagtaatccgacccggttaaaatcgtaatccggaagggttagtaactctgctagtttaaggttcccccatgacacagctatcacatttacgtaaggattcagaggatggattgctttcgccacatcggtgacaatgtcgaatgacagtcgatcctttttggttaacagcaaagtgctacaaaacatgatttgctcagccagtaaattctctattctgcgcttgccatggaaaagattctcctgaaatgcaggtatcagtgctttccctccgttatagtcatcattgagcataacggtatcgacaagtgataaaagtgattttagctgtaatcgctcatgagtctgcagatacttaattaatggcagtgggtggctacctccggatgtttcgacaaatataacgtcaggcaaataatgcctgagcatatttttaattgccttgtcgaccgtcttaatcccactctggctgctgatactatcagatgtgatactcacgaaattattgttcgcaatattaacgatttctgtatttgcaataagtacaccatcaacatccagatcgctcatatcattgacaatgacagatacagctaagtgattcctgtttgcctgtgtgagcaggtttttcataagagtggtttttcctgcgccaaggaaaccattgataatgattactgggatcctgttcatatttactggacacctgtgagttaaagtgatacctaagatgacggggaactgactccatgccaagaatattattcctgcatatcagtgatattgcagacaagtacatagggacaacgagaatgctctggtataaaaactggagctatcaatgtattaggtaagatacatcaacaaaataattatgagtttttttacatggatgtcagtaggctatttccggttgatataccctgcccgtaaaatacagggcaggaatagtatcattaatttcgggagaagcttaaggttgccacatcgacagtttcatcacacaggcttttgtcctgaaaacttttcttattttggactttcgccagccactgtccgatatgaagagaaggtactgtgacgataccatcctcattagttacaaaggtgagttctgctttatgaacaggatgtttgtgctcaactgcatgagtatgacgggatgatgtcagataactgaccgagtcaagctccatgatagctccggcgagcggggacgttttatacagaactttcagcttcacattttcactgaaacgacttatatcggataacggaatgatttcaagctcatgccctgttggagactgatagagttgtgctggcatctgctgttcaccaggaataaaagattttgcatatttagtgacaaattcacagtaagccacatcatttctgccctcccggctgaccggtttccatcctgacgaggttctcgaccagtatcccggtttcatatacgttgacagaacgtaaccattatctttgcttgcagactcagttttatagacataatccgtggacgctggcttcagtgttattgtctctttcccgttataaagccggggattttcaaagaaatcccttctgtcaggaattgtcccctttgaggggaaattatgaccataaccaatctctgcggtaacgttgttctctgcctgtttacctgtaatccagacatcatgggctaggacatgccccgatgctgtcagacaaagagctaagatatagcctgtatttttcatcatgatttatttcctgcgaggttaccactgataacgggtataaagactgacagttctgcctgaaagcggcacacctttgccattcatggcaagcttgttgaaggcattatccagagttactgacgcctcaaagcctttaacacttacaggcttataagacagtgaaaaggaatgtatggtataaccagcctgatggggatcgccttttttcacatgcgtggctgatgctgaaagttcagcacgccatccggcataaacgcctctatgaccaacaggtatgctgatgtcactgataagtgtgtcaggattgccggagcccagccattccctgctgctggcatccatactttccgtccggttataagaaagcatccagtcaacataatcagactggtaattaccctgcatatcccatccccagatacgggcccgggatacattataagaataagaacgcatccgtttcatatccacgcgtgtggcaatatagtttctggcatccgttccgaaatatccgccttttaactgcagccggtcattgtctgtaagcaggccatccagttgaatacctgcgccaatctcacgggtgatgttattttctggtttcagattaaggttaggaacccagtaattgggtttacccttgcggtaaaaatgtacatcatccctgtacatttctgccattgtgggcgctcggaatgcagaggatatggagccgtacatcatcagccagtctgtcggtgagactgaaatcgccgcccttggggacaggcgttcggctttcagttctccggcacggggattgaagctcttgtaccggtcatagcgggaaccgacgataatgttaaccgggtagcttttcattgtcatttcatcctggaaatacaacgatgtaaagtcaatgtttccttccggatatagtgtggcagagccttctggcttctgctgctgacggtaatattcagcgccataacttaactgatgggctcccggaaaaatcagagtatgactcctgttgacaacattaacaccggaggttctgttgtttctccattctgccgttttgttgtgaccgtttgtcttgatagtgatatcactgagatataacgttgactttacattgatgaggctgttatccacaggagcgtactggtaccagaactgtacgtcattttgtactgtttttctgtcacgcaggccgctgtcaccatgtgtctgagtggaattgcccggttcagtggtgttattccggtagagacgcaagctggcacctgctttgttactgtctgttataccgacagagcctttcgcaaacagggctgcaggtttttccttgttaggtgcgtgctcaccatcactttgatagatattacctcttttacgcataatgacagaaaggagcgcatctgtttttccagttttaccaaaccaggtgagccccgagcctgtgctgtggtcaccactggcgatatttccccacagacttaaaccgtttgtctctccggggggaagaaaatctgctgcatcggcagttctgaagtccactacacctcccagcccgccactgccgtacagactggagtttggcccgcggacaacttcgatacgtttgacgagtgccggatccagataagtgccactgctttttgccatgtcactgagttggcgaacgccgtcaacaagaacaagtaccccgcttttgtcatagccgcgtaaattaaaggtctgcccattggtccgtcctgcaccagtctggctgagaccggcaacacctttcagcatgccggccgatgtaaccgcattctgactccacggtgtgtcattcgtgacgacactgaccatcgacggcgtttcaaataccgtgttctgatttcctgtcgcgacaatggtgattgtatctttaaccatagaagaatgactggtcgctgcctgtaatcccaccggaagtataattaatgtacaaatgacagttctgattacattcatatacattcgaaaacaaatgttgtgattgtgatgttatatcataacattttatttatgcaactctgattatgtagcgttcagtgatgctctgttaataatgttctgtcgatccgctaagtgtcagtgtatgcggtaagcccaccctgtgtaagttcacagagatattgcaattacctccagataagtactgtctcttatacacaaatccccccggggatttgttatgtctgtcagtctgctttaggggggactctttccatccggtactttccttcctccccggcagccattttttgaactttttcttcactcgttgatcttttcttatatttcattttcttcgggtctgttatggtactttctgattgttattcatgggataacgagcagtctggacatgcccgtctcggtgatccgcgtcgtacacgacgccttgtgtcactgacctcttctctcgctcagcatgcaggtctttctattgtgaaatcatcccagtccactgctcaggttgaaggtgcgtaccgcctgatacgtaacccgtctgtgtccccgcaagccattgccgaagccggatttaccgccactgtaagggcatgtgaggctcatccgctgctcctcgcactggaagacaccaccaccattaacttcagccacagtacggcatctgatgaccaggggaataccaccactaacccgaagacgcgcgggctgctggctcactctgtcctgatgtacgcccctgacagcgccctgccagtcggtttgaaccgccccgggaatcctggagactaaacttcctgagaaagaggtaaacaggatgactaaaaatactcgtttttcccccgaagtccgtcaacgggcagtccgtatggttctggaaagtcagagcgaatatgactcacaatgggcgacaatttgttccattgctccaaagattggctgtacgccggagactctgcgtgtctgggttcgccagcatgagcgggataccgggggcggtgatggagggctcaccaccgctgaacgtcagcgtctgaaagagctggaacgtgaaaatcgtgaactgcgccgcagtaacgatatccttcgccaggcttccgcttattttgcgaaggcggagttcgaccgcctctggaaaaaatgatgccactgctggataagctgcgtgagcagtacggggtcggaccgctatgcagcgaactgcatattgccccgtcaacgtattaccactgtcagcaacagcgacatcatccggataaacgcagtgcccgtgcgcagcgcgatgactggctgaagaaagagatacagcgcgtatacgatgaaaatcacaaggtatacggtgtgcgtaaagtctggcgtcagttgttacgggaaggtatcagagtggccagatgcactgtggcacgtctcatggcggttatgggacttgccggtgttctccggggtaaaaaggtccgtacgaccatcagccggaaagccgttgccgcaggcgaccgcgtaaaccgtcagttcgtggcagaacgacctgaccagctgtgggtggctgattttacttacgtcagcacatggcggggcttcgtctatgtggcgttcatcattgatgtgtttgccggatacatcgtggggtggcgggtctcatcgtccatggaaacgacattcgtgctggatgcactggagcaggcgttatgggcccgtcgaccgtccggcacggtccatcacagtgataaaggttctcagtatgtatcgctggcctacacacagcggcttaaggaagccggattactggcatcaacaggaagtacaggcgactcgtatgacaacgcgatggcggagagcatcaatggtctttacaaagcggaggtaatacaccgtaagagctggaaaaaccgtgcagaagtggaactggccacactcacgtgggtggactggtataacaatcgacgattgctggaaaggctgggccatactcctccggcagaagcagaaaaagcttattatgcttccatcggaaacgatgatctggcagcctgagttcacagataaaacactctccaggaaacccggggcggtt

SEQ ID NO: 508 - DNA, 315 bp, Escherichia coli
ctgcaacacctgatagggcaaatggtcaatgatgtcagagggtctgtcgacggatgggattttaaacagtacattttgggcgcacttttcaaccgttttatcagcgaaaatttttccagctatatggaatattgtcgatcaagatgttgtaaaaagatccagaaaaaatatttcaaaggcatgaaagaacttgctgacaagaagtttattgcagagaccatgatacagaactattactttattaacccaggctatatgtttaatggtcatcgcttgacctatatgaagacctattacctgaaggataaaaacgaa

SEQ ID NO: 509 - protein, 105 aa, Escherichia coli
LQHLIGQMVNDVRGSVDGWDFKQYILGALFNRFISENFSSYMEYCRSRCCKKIQKKYFKGMKELADKKFIAETMIQNYYFINPGYMFNGHRLTYMKTYYLKDKNE

SEQ ID NO: 510 - DNA, 303 bp, Escherichia coli
gtgcttacaccacaacatttacgttgtgtgttaacatgtagcgatttactgactcttttgagtggtaccgttatgtctcaaatgcccctctattttcttaatacccaaaagaaactcactgctcactatgaatggcttcaaatcaacctgactgatacctacgaactagttaaaaggttaatgccgattccttcactggacgtggtggttaaagtagggaaacttgtcctcccggagaaagggcatcatggtttttaccctgaagctggagttgtctatagaacagtagctccagaaaatcca

SEQ ID NO: 511 - protein, 101 aa, Escherichia coli
VLTPQHLRCVLTCSDLLTLLSGTVMSQMPLYFLNTQKKLTAHYEWLQINLTDTYELVKRLMPIPSLDVVVKVGKLVLPEKGHHGFYPEAGVVYRTVAPENP

SEQ ID NO: 512 - DNA, 327 bp, Escherichia coli
atgcgcactccattgctcgaatgtttgcacatgaactgcatcgtgctgttagatgggccgagatacggctcaactttaggagaagtcatagtctctgaagggcttgcagggcacttttcgcttgagctttttgctggtgaacctgaccccagagaaaaactcacatcagatattgttcaaccgtacaggctgcatttgcttgaaaactggtatagtactgattacgattgtaacgcttggttgttcggaaccggggacttgccaagatggctggaatataccaaaggttttaaactgatttccagatacctcgtacattcccacatt

SEQ ID NO: 513 - protein, 109 aa, Escherichia coli
MRTPLLECLHMNCIVLLDGPRYGSTLGEVIVSEGLAGHFSLELFAGEPDPREKLTSDIVQPYRLHLLENWYSTDYDCNAWLFGTGDLPRWLEYTKGFKLISRYLVHSHI

SEQ ID NO: 514 - DNA, 357 bp, Escherichia coli
atgacatttagatactatctcagacattgtttatggggcttagtcggttgtggctctttggtttacaacattttgactgatttaaaggatggaaagatatttccttcttatattccttatataccttatgttgcagcataccttgctattggtgctgtagcatacccgtttgcatattatgctttagaaatatcagcgcaaaagataataccaaagaaatcctgggatagattttttagtgatactggatcatcaaggaatttattcttattcgtattaatgttttgtatattatttatcgtacctctactcgcattatatttttgcatatcaaaaaaacataataaattacaaacc

SEQ ID NO: 515 - protein, 119 aa, Escherichia coli
MTFRYYLRHCLWGLVGCGSLVYNILTDLKDGKIFPSYIPYIPYVAAYLAIGAVAYPFAYYALEISAQKIIPKKSWDRFFSDTGSSRNLFLFVLMFCILFIVPLLALYFCISKKHNKLQT

SEQ ID NO: 516 - DNA, 219 bp, Escherichia coli
atgcctgatgcctttaaatctggagaaaacatttcaagtaaccattctcatcaacatacagcccattgtaataactggatttgccgcaccgaacaaaatttctttggtctgtttcgtgtagagcaactagaaagaaggttggatcaggcagatcgagtcgtagaatcgcttcactataaacttgatccgatttttcacctgtttttcttagtagaaaca

SEQ ID NO: 517 - protein, 73 aa, Escherichia coli
MPDAFKSGENISSNHSHQHTAHCNNWICRTEQNFFGLFRVEQLERRLDQADRVVESLHYKLDPIFHLFFLVET

SEQ ID NO: 518 - DNA, 540 bp, Escherichia coli
atggcaatccctgaacgtatgatccccgtaaaagtcagcagcaaaaaaataagagaattagcacagaaagctaaagagatacttgcagctattgatagtggagcaagtgaagaagatgcttttttaaaggacatgatcgatgactggaacagtcaggtagtatgtccatgtgagttttcagattttagagattattcctcttggacaaatgcaaatgaatttacacgaatagcttttaatttggaaaagttctacgaggattttacttgggaggaactggttcaaacgataagctgtgtatgtgatcaaaagtcaaacgaatcggaaaaaatttttgctcttttgttgcttgaaaagaattttcatggaaatccatccgatcttatattctggcccgatgaatggtttcaggatccagatatgttagatgttgaactgagtgttgaagagattgcatgctatttgatggttcgatccggtaggcaactagttgatgcacctgaaatcgacctgaaatatcaaataccccagtctgacgaa

SEQ ID NO: 519 - protein, 180 aa, Escherichia coli
MAIPERMIPVKVSSKKIRELAQKAKEILAAIDSGASEEDAFLKDMIDDWNSQVVCPCEFSDFRDYSSWTNANEFTRIAFNLEKFYEDFTWEELVQTISCVCDQKSNESEKIFALLLLEKNFHGNPSDLIFWPDEWFQDPDMLDVELSVEEIACYLMVRSGRQLVDAPEIDLKYQIPQSDE

SEQ ID NO: 520 - DNA, 1134 bp, Escherichia coli
atgggaaaaataaaatattggctaatagtaggatttattatactttttgcgattttttacattgctattagtgacagggattctacgctttctaggttgaaatcagcaggtgaaaacggagatgtagaagctcagtatgctttggggctcatgtatttgtatggagaaattctggatgttgattatcagcaggcaaagatttggtatgaaaaagccgctgaccaaaatgatccgcgtgcgcaggccaaactcggtgtgatgtatgcaaatggtctcggggtaaatcaggattatcagcaatcaaaattatggtatgaaaaggcggctgcgcaaaatgatgttgatgcgcaatttttgcttggggagatgtatgacgatggtctcggggtaagccaagactaccagcatgcaaagatgtggtatgaaaaagcggctgctcaaaatgatgagcgtgctcaggtcaatctcgctgttctatacgcaaagggtaatggtgttgaacaggattatcgacaggccaaaagctggtatgaaaaggctgcagctcaaaatagtcctgatgcgcagttcgctcttggaattctgtatgccaatgctaatggtgtagagcaggactatcagcaggcaaaagactggtatgagaaagcagcagaacaaaatttcgccaatgctcagtttaatcttggtatgctctattacaaaggtgagggtgttaaacaaaactttcggcaagccagagaatggtttgaaaaagccgcatctcaaaatcagccgaatgcccaatataatttaggtcagatttattactacggtcagggtgtgactcagagctatcgacaggcgaaagactggtttgaaaaagcggcagagaaaggtcatgtcgatgctcaatataatctcggtgtaatatacgaaaatggtgaaggtgtgagtcagaactatcaacaggcaaaggcttggtatgaaaaggcagcctcacaaaatgatgcgcaggcgcagttcgaacttggcgttatgaatgaactgggtcagggtgaaagcatagacctgaaacaagcaagacattactatgagcggtcatgtaataatgggcttaagaaaggttgtgaacggttaaaagagttattatacaaa

SEQ ID NO: 521 - protein, 378 aa, Escherichia coli
MGKIKYWLIVGFIILFAIFYIAISDRDSTLSRLKSAGENGDVEAQYALGLMYLYGEILDVDYQQAKIWYEKAADQNDPRAQAKLGVMYANGLGVNQDYQQSKLWYEKAAAQNDVDAQFLLGEMYDDGLGVSQDYQHAKMWYEKAAAQNDERAQVNLAVLYAKGNGVEQDYRQAKSWYEKAAAQNSPDAQFALGILYANANGVEQDYQQAKDWYEKAAEQNFANAQFNLGMLYYKGEGVKQNFRQAREWFEKAASQNQPNAQYNLGQIYYYGQGVTQSYRQAKDWFEKAAEKGHVDAQYNLGVIYENGEGVSQNYQQAKAWYEKAASQNDAQAQFELGVMNELGQGESIDLKQARHYYERSCNNGLKKGCERLKELLYK

SEQ ID NO: 522 - DNA, 1203 bp, Escherichia coli
gtaaatatgaacaggatcccagtaatcattatcaatggtttccttggcgcaggaaaaaccactcttatgaaaaacctgctcacacaggcaaacaggaatcacttagctgtatctgtcattgtcaatgatatgagcgatctggatgttgatggtgtacttattgcaaatacagaaatcgttaatattgcgaacaataatttcgtgagtatcacatctgatagtatcagcagccagagtgggattaagacggtcgacaaggcaattaaaaatatgctcaggcattatttgcctgacgttatatttgtcgaaacatccggaggtagccacccactgccattaattaagtatctgcagactcatgagcgattacagctaaaatcacttttatcacttgtcgataccgttatgctcaatgatgactataacggagggaaagcactgatacctgcatttcaggagaatcttttccatggcaagcgcagaatagagaatttactggctgagcaaatcatgttttgtagcactttgctgttaaccaaaaaggatcgactgtcattcgacattgtcaccgatgtggcgaaagcaatccatcctctgaatccttacgtaaatgtgatagctgtgtcatgggggaaccttaaactagcagagttactaacccttccggattacgattttaaccgggtcggattacttatcagagaactggaagacacaatcacagtagaagaagcaaaaatttcagcccaaaatggcgaaataatttcgcgagtgattaaagatgacaggccattccacccacaaagattatgggaaacctatcattattttatgggaatgggtatttatcgtagtaaaggctttttctggctaccaggaagacctgacatggctctgctctggaaccaggccgcaggaagtatcaatctggagtttatcagctactggaattccggtgtattggcagaccctgataatcacctgacccacgaagagcgctctgttttgcagaaaaaagtcaataaaactatggggcggtttggagacaggagatgccatttaacgattatagggcgttctgatgaagtccatgattttacctccgccttaattaactgttttctttctgaagaagaaattgtctggtggcaatcaggtggcgttttcgcggatccctggcccgttaatatatcccggctgaac

SEQ ID NO: 523 - protein, 401 aa, Escherichia coli
VNMNRIPVIIINGFLGAGKTTLMKNLLTQANRNHLAVSVIVNDMSDLDVDGVLIANTEIVNIANNNFVSITSDSISSQSGIKTVDKAIKNMLRHYLPDVIFVETSGGSHPLPLIKYLQTHERLQLKSLLSLVDTVMLNDDYNGGKALIPAFQENLFHGKRRIENLLAEQIMFCSTLLLTKKDRLSFDIVTDVAKAIHPLNPYVNVIAVSWGNLKLAELLTLPDYDFNRVGLLIRELEDTITVEEAKISAQNGEIISRVIKDDRPFHPQRLWETYHYFMGMGIYRSKGFFWLPGRPDMALLWNQAAGSINLEFISYWNSGVLADPDNHLTHEERSVLQKKVNKTMGRFGDRRCHLTIIGRSDEVHDFTSALINCFLSEEEIVWWQSGGVFADPWPVNISRLN

SEQ ID NO: 524 - DNA, 789 bp, Escherichia coli
atgatgaaaaatacaggctatatcttagctctttgtctgacagcatcggggcatgtcctagcccatgatgtctggattacaggtaaacaggcagagaacaacgttaccgcagagattggttatggtcataatttcccctcaaaggggacaattcctgacagaagggatttctttgaaaatccccggctttataacgggaaagagacaataacactgaagccagcgtccacggattatgtctataaaactgagtctgcaagcaaagataatggttacgttctgtcaacgtatatgaaaccgggatactggtcgagaacctcgtcaggatggaaaccggtcagccgggagggcagaaatgatgtggcttactgtgaatttgtcactaaatatgcaaaatcttttattcctggtgaacagcagatgccagcacaactctatcagtctccaacagggcatgagcttgaaatcattccgttatccgatataagtcgtttcagtgaaaatgtgaagctgaaagttctgtataaaacgtccccgctcgccggagctatcatggagcttgactcggtcagttatctgacatcatcccgtcatactcatgcagttgagcacaaacatcctgttcataaagcagaactcacctttgtaactaatgaggatggtatcgtcacagtaccttctcttcatatcggacagtggctggcgaaagtccaaaataagaaaagttttcaggacaaaagcctgtgtgatgaaactgtcgatgtggcaaccttaagcttctcccgaaat

SEQ ID NO: 525 - protein, 263 aa, Escherichia coli
MMKNTGYILALCLTASGHVLAHDVWITGKQAENNVTAEIGYGHNFPSKGTIPDRRDFFENPRLYNGKETITLKPASTDYVYKTESASKDNGYVLSTYMKPGYWSRTSSGWKPVSREGRNDVAYCEFVTKYAKSFIPGEQQMPAQLYQSPTGHELEIIPLSDISRFSENVKLKVLYKTSPLAGAIMELDSVSYLTSSRHTHAVEHKHPVHKAELTFVTNEDGIVTVPSLHIGQWLAKVQNKKSFQDKSLCDETVDVATLSFSRN

SEQ ID NO: 526 - DNA, 1962 bp, Escherichia coli
atgaatgtaatcagaactgtcatttgtacattaattatacttccggtgggattacaggcagcgaccagtcattcttctatggttaaagatacaatcaccattgtcgcgacaggaaatcagaacacggtatttgaaacgccgtcgatggtcagtgtcgtcacgaatgacacaccgtggagtcagaatgcggttacatcggccggcatgctgaaaggtgttgccggtctcagccagactggtgcaggacggaccaatgggcagacctttaatttacgcggctatgacaaaagcggggtacttgttcttgttgacggcgttcgccaactcagtgacatggcaaaaagcagtggcacttatctggatccggcactcgtcaaacgtatcgaagttgtccgcgggccaaactccagtctgtacggcagtggcgggctgggaggtgtagtggacttcagaactgccgatgcagcagattttcttccccccggagagacaaacggtttaagtctgtggggaaatatcgccagtggtgaccacagcacaggctcggggctcacctggtttggtaaaactggaaaaacagatgcgctcctttctgtcattatgcgtaaaagaggtaatatctatcaaagtgatggtgagcacgcacctaacaaggaaaaacctgcagccctgtttgcgaaaggctctgtcggtataacagacagtaacaaagcaggtgccagcttgcgtctctaccggaataacaccactgaaccgggcaattccactcagacacatggtgacagcggcctgcgtgacagaaaaacagtacaaaatgacgtacagttctggtaccagtacgctcctgtggataacagcctcatcaatgtaaagtcaacgttatatctcagtgatatcactatcaagacaaacggtcacaacaaaacggcagaatggagaaacaacagaacctccggtgttaatgttgtcaacaggagtcatactctgatttttccgggagcccatcagttaagttatggcgctgaatattaccgtcagcagcagaagccagaaggctctgccacactatatccggaaggaaacattgactttacatcgttgtatttccaggatgaaatgacaatgaaaagctacccggttaacattatcgtcggttcccgctatgaccggtacaagagcttcaatccccgtgccggagaactgaaagccgaacgcctgtccccaagggcggcgatttcagtctcaccgacagactggctgatgatgtacggctccatatcctctgcattccgagcgcccacaatggcagaaatgtacagggatgatgtacatttttaccgcaagggtaaacccaattactgggttcctaaccttaatctgaaaccagaaaataacatcacccgtgagattggcgcaggtattcaactggatggcctgcttacagacaatgaccggctgcagttaaaaggcggatatttcggaacggatgccagaaactatattgccacacgcgtggatatgaaacggatgcgttcttattcttataatgtatcccgggcccgtatctggggatgggatatgcagggtaattaccagtctgattatgttgactggatgctttcttataaccggacggaaagtatggatgccagcagcagggaatggctgggctccggcaatcctgacacacttatcagtgacatcagcatacctgttggtcatagaggcgtttatgccggatggcgtgctgaactttcagcatcagccacgcatgtgaaaaaaggcgatccccatcaggctggttataccatacattccttttcactgtcttataagcctgtaagtgttaaaggctttgaggcgtcagtaactctggataatgccttcaacaagcttgccatgaatggcaaaggtgtgccgctttcaggcagaactgtcagtctttatacccgttatcagtgg

SEQ ID NO: 527 - protein, 654 aa, Escherichia coli
MNVIRTVICTLIILPVGLQAATSHSSMVKDTITIVATGNQNTVFETPSMVSVVTNDTPWSQNAVTSAGMLKGVAGLSQTGAGRTNGQTFNLRGYDKSGVLVLVDGVRQLSDMAKSSGTYLDPALVKRIEVVRGPNSSLYGSGGLGGVVDFRTADAADFLPPGETNGLSLWGNIASGDHSTGSGLTWFGKTGKTDALLSVIMRKRGNIYQSDGEHAPNKEKPAALFAKGSVGITDSNKAGASLRLYRNNTTEPGNSTQTHGDSGLRDRKTVQNDVQFWYQYAPVDNSLINVKSTLYLSDITIKTNGHNKTAEWRNNRTSGVNVVNRSHTLIFPGAHQLSYGAEYYRQQQKPEGSATLYPEGNIDFTSLYFQDEMTMKSYPVNIIVGSRYDRYKSFNPRAGELKAERLSPRAAISVSPTDWLMMYGSISSAFRAPTMAEMYRDDVHFYRKGKPNYWVPNLNLKPENNITREIGAGIQLDGLLTDNDRLQLKGGYFGTDARNYIATRVDMKRMRSYSYNVSRARIWGWDMQGNYQSDYVDWMLSYNRTESMDASSREWLGSGNPDTLISDISIPVGHRGVYAGWRAELSASATHVKKGDPHQAGYTIHSFSLSYKPVSVKGFEASVTLDNAFNKLAMNGKGVPLSGRTVSLYTRYQW

SEQ ID NO: 528 - DNA, 438 bp, Escherichia coli
atggtactttctgattgttattcatgggataacgagcagtctggacatgcccgtctcggtgatccgcgtcgtacacgacgccttgtgtcactgacctcttctctcgctcagcatgcaggtctttctattgtgaaatcatcccagtccactgctcaggttgaaggtgcgtaccgcctgatacgtaacccgtctgtgtccccgcaagccattgccgaagccggatttaccgccactgtaagggcatgtgaggctcatccgctgctcctcgcactggaagacaccaccaccattaacttcagccacagtacggcatctgatgaccaggggaataccaccactaacccgaagacgcgcgggctgctggctcactctgtcctgatgtacgcccctgacagcgccctgccagtcggtttgaaccgccccgggaatcctggagac

SEQ ID NO: 529 - protein, 146 aa, Escherichia coli
MVLSDCYSWDNEQSGHARLGDPRRTRRLVSLTSSLAQHAGLSIVKSSQSTAQVEGAYRLIRNPSVSPQAIAEAGFTATVRACEAHPLLLALEDTTTINFSHSTASDDQGNTTTNPKTRGLLAHSVLMYAPDSALPVGLNRPGNPGD

SEQ ID NO: 530 - DNA, 324 bp, Escherichia coli
atgactaaaaatactcgtttttcccccgaagtccgtcaacgggcagtccgtatggttctggaaagtcagagcgaatatgactcacaatgggcgacaatttgttccattgctccaaagattggctgtacgccggagactctgcgtgtctgggttcgccagcatgagcgggataccgggggcggtgatggagggctcaccaccgctgaacgtcagcgtctgaaagagctggaacgtgaaaatcgtgaactgcgccgcagtaacgatatccttcgccaggcttccgcttattttgcgaaggcggagttcgaccgcctctggaaaaaa

SEQ ID NO: 531 - protein, 108 aa, Escherichia coli
MTKNTRFSPEVRQRAVRMVLESQSEYDSQWATICSIAPKIGCTPETLRVWVRQHERDTGGGDGGLTTAERQRLKELERENRELRRSNDILRQASAYFAKAEFDRLWKK

SEQ ID NO: 532 - DNA, 888 bp, Escherichia coli
atgatgccactgctggataagctgcgtgagcagtacggggtcggaccgctatgcagcgaactgcatattgccccgtcaacgtattaccactgtcagcaacagcgacatcatccggataaacgcagtgcccgtgcgcagcgcgatgactggctgaagaaagagatacagcgcgtatacgatgaaaatcacaaggtatacggtgtgcgtaaagtctggcgtcagttgttacgggaaggtatcagagtggccagatgcactgtggcacgtctcatggcggttatgggacttgccggtgttctccggggtaaaaaggtccgtacgaccatcagccggaaagccgttgccgcaggcgaccgcgtaaaccgtcagttcgtggcagaacgacctgaccagctgtgggtggctgattttacttacgtcagcacatggcggggcttcgtctatgtggcgttcatcattgatgtgtttgccggatacatcgtggggtggcgggtctcatcgtccatggaaacgacattcgtgctggatgcactggagcaggcgttatgggcccgtcgaccgtccggcacggtccatcacagtgataaaggttctcagtatgtatcgctggcctacacacagcggcttaaggaagccggattactggcatcaacaggaagtacaggcgactcgtatgacaacgcgatggcggagagcatcaatggtctttacaaagcggaggtaatacaccgtaagagctggaaaaaccgtgcagaagtggaactggccacactcacgtgggtggactggtataacaatcgacgattgctggaaaggctgggccatactcctccggcagaagcagaaaaagcttattatgcttccatcggaaacgatgatctggcagcc

SEQ ID NO: 533 - protein, 296 aa, Escherichia coli
MMPLLDKLREQYGVGPLCSELHIAPSTYYHCQQQRHHPDKRSARAQRDDWLKKEIQRVYDENHKVYGVRKVWRQLLREGIRVARCTVARLMAVMGLAGVLRGKKVRTTISRKAVAAGDRVNRQFVAERPDQLWVADFTYVSTWRGFVYVAFIIDVFAGYIVGWRVSSSMETTFVLDALEQALWARRPSGTVHHSDKGSQYVSLAYTQRLKEAGLLASTGSTGDSYDNAMAESINGLYKAEVIHRKSWKNRAEVELATLTWVDWYNNRRLLERLGHTPPAEAEKAYYASIGNDDLAA

SEQ ID NO: 534 - DNA, 4871 bp, Escherichia coli
cgaggccatgctgttgattagcatggccttttatatgcttgttttttcggtatgccatccagtatgccattgccgtccggcttgcactggctcacctgaaatagcttcagacaactcactcacctctcatctcgctggcagtgctcccggattggtgtcgggcgatgatgttgttcagcttatcaatcagctcaggtcgcttgaatacgatttgtgcagttcccttctgaaaatacttaatcacaaacatctcatcctcatagtggttgctgtgccggttttcatgaatatggtctcccagccgacgggtaacgtcagcgcggttgtcgggaacaggcttcccgtcaaggatcatcagcattcgctcaaggtctgctaaccggtcacgctgtcagccatggttaagcccgaatccccaccggtcgaatttgaccagtcccgtcacaatgattttcgctccaaacccgcagggcgaattcgtcttaaaattccagcttaatcctttgaaaacgttaatgacgccacgctaaaacacctcacccttgttcaaatgcagttgcttaaaggtgctcagaatattcgcttcgctgaccaccggaatatcatccttttctaggctgttgtaccactggttacgggcctgagcgtccataatcgacagcatccctgagcgtttcattaaatcccgccatttaccgcgatcgagattgcgggtaatggctttcatcgctgtttcaggcttctccataagccagcaaccacagcgaaaatcctgtttcatgacccagtccagggcggtttttccgccgatactgagggtttgtgtcgaaatatcgttaatctggtggagcaatgcttcaatctgtgtcagcgccgcattacgtccggtgacgatgcgttcaatactggtggagcaaatcacatcggtatgatcggttaatacttcggggttggtgagagtaggttctgacattatttatttcctttatacaaagcaaagcgccagccggtgggggctggcacgtgtatgtgtgtaatgagtacggacagggagttaatctgtacgggtcttttgcagacgttgaaactgacacagctcgcgaacgtcctgacatgcacgttcaatccagggaaacagtactgccgaatctgttttatcctcatcgttgtcaaagataattcccgattcgcagtcgatattgttcgtaagcgtaaagccaatgccgtctgtaactcctgatccttgcagactaaattagagctccttctaaattagacggagttctattgatggataaacctacagactggcgctctgggacgcgccggatattttctaatgaatttaagcttcatatggttgaactggcttcgaaaccaaatgccaatgttgcacaactggcccgggaacatggcgttgataacaacctgatttttaaatggctacgtctctggcaaagagaaggacgtatttctcgtagaatgcctccaactattccattacggtaaaatgacactgggaaatccttcaccagagctgctcacggtgttgatccgtgaactgaccgggaggggaagatgatctcactcccatcaggtacccgcatctggctcgtggccggcgttaccgatatgcgtaaatccttcaacggtctgggagaacaggtacaacatgtgctggatgagacccccttctcaggtcacctgtttatctttcgtggccgacggggtgacactgttaaaatactctgggccgatgctgatggtctgtgcctgttcaccaaacgcctggaggaaggccagtttatctggcctgcggtgcgtgacggtaaggtatccattacccgctcgcaactggcaatgctcctcgataagctggactggcgtcagccaaaaacattccgccttaactcactgacaatgttgtaaaaaatgcctggccgcattataaaaacggccatgagtcagaaatacctcattcgcattgcagaactggaaagccagctccgtcagaaagaccagcaactgagtctggttgaagagacgaagaccttcctgcgctctgcactggcacgtgccgaagaaaagatcgaagaagatgaacgggaaatagaacatctgcgggctcagatagaaaaactgcgccggatgctgttcggtacctgttctgaaaaactgcgtcgtgaagttgaacaggctgaggccctgctgaaacaacgcgaacaggacagcgatcgttacagtgggcgggaagacgatccacaggttccccgccagttgcggcagtcgcgccatcgtcgtccgttcccggcacaccttccccgtgaaatacaccgtctggagtctgaagaaagctgttgcccggagtgtggcggtgagctggattatctgggggaagtcagtgcagaacaactggaactggtgagcagcgctctgaaagtgatccgcacagaacgggtaaaaaaagcctgtacaaaatgtgactgcatcgttgaagcaccggcgccgtcccgccgcgatagagcgtggtatcgcgggccccggattacttgcccgcgtgtttacgggaaaatactgcgaacacctgccactgtatcgtcagagtgaaatctttgcccgacagggtgtcgaactgagccgtgcattactctccaactgggttgacgcgtgctgccagttaatgacgccgctgaatgatgccctgtatcgttatgtgatgaatacccgcaagcttcacactgacgacacaccggtaaaggtactggcaccgggcctgaaaaagacgaaaacagggcgcatctggacgtatgtccgggatgatcgcaatgcgggttcgtcatctcctccggcggtctggttcgcgtactcaccgaacaggcaggggaaacacccggagcaacacctccgccccttccggggtatcctgcaggcggatgcgttcacaggttacgacaggctgttcagtgcagaacgcgaaggtggtgcgctgacagaagttgcgtgctgtgctcatgcccggagaaaaatccacgatgtatacatcagcagcaaaagtgcgatggcagaagaagccctgaagcgaatcagtgaactgtacgccatcgaggatgaaatacggggattaccagagtcagagcgtcttgcagtcaggcagcagcgaagcaaagcgttactgacgtcgctgcatgaatggatggtggagaagaatggcacgctgtcgaaaaaatccagactgggcgaagcgttcagctatgtactgaatcagtgggacgccctctgttattaccgtgatgacggtctggcggaggcggacaataacacagcggaaagagcgcttcgtgcagtctgtctcggaaagaaaaattcttatgacctttgtcaaatattaagcccaaaaagaccttacgcagctccgggagcttcgttatatcgcggattaaagaacctgaaacagtcagactgtatcttggattttacaaactcttattcggggattttagccccatgacgatttacgcagtgagctggcctctttctacgtgcaggtattagcgcattctggcttccctgaattcttttacgaggatcactcattccgtgtctgactgcttcagggtttaattttgcttctgctgactgaatgatgattgggcagcaagtgcaatatcccacataaatccagtcaactcacgagccaccgccgtaatggctacttgtgattttttcccttttgctgtcagacttcggtaacgagaacacaatcgttgttgagctttccatgcaatatctttggaatattgtgttacagagtccggtcggtaatatataagccatgccccaacttttgcaggtgtacgataagaccaggcggcttcgtaaagcagacgtctcagttcgctgtttccaacttttgttattcctctgggacgaatactgtttccactggaatattcacctggcaccagtcccagaaaagccatgagctgtttgggattggaaaatcgcgaaaaatcacccagttcagcaaccagagttattgcaattagctgaccaacacctttaagagcctgcaactggcagaccagattgcacagagaccactcaggtaacaggcgagatatttcctggtcgagttgaagtatgcgatcttcaatctgctccagactttgacaatagtgttgaaaagcaatctgttgagatggctgactaaatgattgattagctaaccaggttcgatgttttcctgtccagtgctttcctgcataatgtttgtctgttcgcaatagcatgctcagaattcgctgtcgggcaactctgctgtctcgtttagctgctgcacgggctctgattagatcccgcatagcttcatgagtcaggtcagggatccagacaggggtaagttctccagcccgcagtaacctggcgagagaaattgcgtcccgatgatcatttttgattctgtctgtcggtgattttggtatgcgggaaggggcaataacctggcattttatattcatcgctgtgagttgatgatatagcccaaaaccacaggggccagcctcatagcaggaaagaatgtttccgtaaagtccctgcaatttctgaaataatcgacgtacagcctgggcttcgttgttaatcgtaccataataacgaacttcgccaagccgttcaggtgcagcaatagcaaccgccaacgtttctttatgcacatccagcccgacgtaagccgcaatattttccgaatgcatgatgacctcctctggaatatcccaccaatgctatagtgagtatataaaggtcatatcatctacgtgttcttcggtagcgatcacggcggcgagcgtggagcactgctgtacgggctgatc

SEQ ID NO: 535 - DNA, 849 bp, Escherichia coli
atgtcagaacctactctcaccaaccccgaagtattaaccgatcataccgatgtgatttgctccaccagtattgaacgcatcgtcaccggacgtaatgcggcgctgacacagattgaagcattgctccaccagattaacgatatttcgacacaaaccctcagtatcggcggaaaaaccgccctggactgggtcatgaaacaggattttcgctgtggttgctggcttatggagaagcctgaaacagcgatgaaagccattacccgcaatctcgatcgcggtaaatggcgggatttaatgaaacgctcagggatgctgtcgattatggacgctcaggcccgtaaccagtggtacaacagcctagaaaaggatgatattccggtggtcagcgaagcgaatattctgagcacctttaagcaactgcatttgaacaagggtgaggtgtttcgtggcgtcattaacgttttcaaaggattaagctggaattttaagacgaattcgccctgcgggtttggagcgaaaatcattgtgacgggactggtcaaattcgaccggtggggattcgggcttaaccatggccagcgtgaccggttagcagaccttgagcgaatgctgatgatccttgacgggaagcctgttcccgacaaccgcgctgacgttacccgtcggctgggagaccatattcatgaaaaccggcacagcaaccactatgaggatgagatgtttgtgattaagtattttcagaagggaactgcacaaatcgtattcaagcgacctgagctgattgataagctgaacaacatcatcgcccgacaccaatccgggagcactgccagcgagatgagaggtgag

SEQ ID NO: 536 - protein, 283 aa, Escherichia coli
MSEPTLTNPEVLTDHTDVICSTSIERIVTGRNAALTQIEALLHQINDISTQTLSIGGKTALDWVMKQDFRCGCWLMEKPETAMKAITRNLDRGKWRDLMKRSGMLSIMDAQARNQWYNSLEKDDIPVVSEANILSTFKQLHLNKGEVFRGVINVFKGLSWNFKTNSPCGFGAKIIVTGLVKFDRWGFGLNHGQRDRLADLERMLMILDGKPVPDNRADVTRRLGDHIHENRHSNHYEDEMFVIKYFQKGTAQIVFKRPELIDKLNNIIARHQSGSTASEMRGE

SEQ ID NO: 537 - DNA, 192 bp, Escherichia coli
ctgcaaggatcaggagttacagacggcattggctttacgcttacgaacaatatcgactgcgaatcgggaattatctttgacaacgatgaggataaaacagattcggcagtactgtttccctggattgaacgtgcatgtcaggacgttcgcgagctgtgtcagtttcaacgtctgcaaaagacccgtacagat

SEQ ID NO: 538 - protein, 64 aa, Escherichia coli
LQGSGVTDGIGFTLTNNIDCESGIIFDNDEDKTDSAVLFPWIERACQDVRELCQFQRLQKTRTD

SEQ ID NO: 539 - DNA, 216 bp, Escherichia coli
atggataaacctacagactggcgctctgggacgcgccggatattttctaatgaatttaagcttcatatggttgaactggcttcgaaaccaaatgccaatgttgcacaactggcccgggaacatggcgttgataacaacctgatttttaaatggctacgtctctggcaaagagaaggacgtatttctcgtagaatgcctccaactattccattacgg

SEQ ID NO: 540 - protein, 72 aa, Escherichia coli
MDKPTDWRSGTRRIFSNEFKLHMVELASKPNANVAQLAREHGVDNNLIFKWLRLWQREGRISRRMPPTIPLR

SEQ ID NO: 541 - DNA, 349 bp, Escherichia coli
atgatctcactcccatcaggtacccgcatctggctcgtggccggcgttaccgatatgcgtaaatccttcaacggtctgggagaacaggtacaacatgtgctggatgagacccccttctcaggtcacctgtttatctttcgtggccgacggggtgacactgttaaaatactctgggccgatgctgatggtctgtgcctgttcaccaaacgcctggaggaaggccagtttatctggcctgcggtgcgtgacggtaaggtatccattacccgctcgcaactggcaatgctcctcgataagctggactggcgtcagccaaaaacattccgccttaactcactgacaatgttgt

SEQ ID NO: 542 - protein, 116 aa, Escherichia coli
MISLPSGTRIWLVAGVTDMRKSFNGLGEQVQHVLDETPFSGHLFIFRGRRGDTVKILWADADGLCLFTKRLEEGQFIWPAVRDGKVSITRSQLAMLLDKLDWRQPKTFRLNSLTML

SEQ ID NO: 543 - DNA, 1356 bp, Escherichia coli
atgctgttcggtacctgttctgaaaaactgcgtcgtgaagttgaacaggctgaggccctgctgaaacaacgcgaacaggacagcgatcgttacagtgggcgggaagacgatccacaggttccccgccagttgcggcagtcgcgccatcgtcgtccgttcccggcacaccttccccgtgaaatacaccgtctggagtctgaagaaagctgttgcccggagtgtggcggtgagctggattatctgggggaagtcagtgcagaacaactggaactggtgagcagcgctctgaaagtgatccgcacagaacgggtaaaaaaagcctgtacaaaatgtgactgcatcgttgaagcaccggcgccgtcccgccgcatagagcgtggtatcgcgggccccggattacttgcccgcgtgtttacgggaaaatactgcgaacacctgccactgtatcgtcagagtgaaatctttgcccgacagggtgtcgaactgagccgtgcattactctccaactgggttgacgcgtgctgccagttaatgacgccgctgaatgatgccctgtatcgttatgtgatgaatacccgcaagcttcacactgacgacacaccggtaaaggtactggcaccgggcctgaaaaagacgaaaacagggcgcatctggacgtatgtccgggatgatcgcaatgcgggttcgtcatctcctccggcggtctggttcgcgtactcaccgaacaggcaggggaaacacccggagcaacacctccgccccttccggggtatcctgcaggcggatgcgttcacaggttacgacaggctgttcagtgcagaacgcgaaggtggtgcgctgacagaagttgcgtgctgtgctcatgcccggagaaaaatccacgatgtatacatcagcagcaaaagtgcgatggcagaagaagccctgaagcgaatcagtgaactgtacgccatcgaggatgaaatacggggattaccagagtcagagcgtcttgcagtcaggcagcagcgaagcaaagcgttactgacgtcgctgcatgaatggatggtggagaagaatggcacgctgtcgaaaaaatccagactgggcgaagcgttcagctatgtactgaatcagtgggacgccctctgttattaccgtgatgacggtctggcggaggcggacaataacacagcggaaagagcgcttcgtgcagtctgtctcggaaagaaaaattcttatgacctttgtcaaatattaagcccaaaaagaccttacgcagctccgggagcttcgttatatcgcggattaaagaacctgaaacagtcagactgtatcttggattttacaaactcttattcggggattttagcccca

SEQ ID NO: 544 - protein, 452 aa, Escherichia coli
MLFGTCSEKLRREVEQAEALLKQREQDSDRYSGREDDPQVPRQLRQSRHRRPFPAHLPREIHRLESEESCCPECGGELDYLGEVSAEQLELVSSALKVIRTERVKKACTKCDCIVEAPAPSRRIERGIAGPGLLARVFTGKYCEHLPLYRQSEIFARQGVELSRALLSNWVDACCQLMTPLNDALYRYVMNTRKLHTDDTPVKVLAPGLKKTKTGRIWTYVRDDRNAGSSSPPAVWFAYSPNRQGKHPEQHLRPFRGILQADAFTGYDRLFSAEREGGALTEVACCAHARRKIHDVYISSKSAMAEEALKRISELYAIEDEIRGLPESERLAVRQQRSKALLTSLHEWMVEKNGTLSKKSRLGEAFSYVLNQWDALCYYRDDGLAEADNNTAERALRAVCLGKKNSYDLCQILSPKRPYAAPGASLYRGLKNLKQSDCILDFTNSYSGILAP

SEQ ID NO: 545 - DNA, 1131 bp, Escherichia coli
atgcattcggaaaatattgcggcttacgtcgggctggatgtgcataaagaaacgttggcggttgctattgctgcacctgaacggcttggcgaagttcgttattatggtacgattaacaacgaagcccaggctgtacgtcgattatttcagaaattgcagggactttacggaaacattctttcctgctatgaggctggcccctgtggttttgggctatatcatcaactcacagcgatgaatataaaatgccaggttattgccccttcccgcataccaaaatcaccgacagacagaatcaaaaatgatcatcgggacgcaatttctctcgccaggttactgcgggctggagaacttacccctgtctggatccctgacctgactcatgaagctatgcgggatctaatcagagcccgtgcagcagctaaacgagacagcagagttgcccgacagcgaattctgagcatgctattgcgaacagacaaacattatgcaggaaagcactggacaggaaaacatcgaacctggttagctaatcaatcatttagtcagccatctcaacagattgcttttcaacactattgtcaaagtctggagcagattgaagatcgcatacttcaactcgaccaggaaatatctcgcctgttacctgagtggtctctgtgcaatctggtctgccagttgcaggctcttaaaggtgttggtcagctaattgcaataactctggttgctgaactgggtgatttttcgcgattttccaatcccaaacagctcatggcttttctgggactggtgccaggtgaatattccagtggaaacagtattcgtcccagaggaataacaaaagttggaaacagcgaactgagacgtctgctttacgaagccgcctggtcttatcgtacacctgcaaaagttggggcatggcttatatattaccgaccggactctgtaacacaatattccaaagatattgcatggaaagctcaacaacgattgtgttctcgttaccgaagtctgacagcaaaagggaaaaaatcacaagtagccattacggcggtggctcgtgagttgactggatttatgtgggatattgcacttgctgcccaatcatcattcagtcagcagaagcaaaat

SEQ ID NO: 546 - protein, 377 aa, Escherichia coli
MHSENIAAYVGLDVHKETLAVAIAAPERLGEVRYYGTINNEAQAVRRLFQKLQGLYGNILSCYEAGPCGFGLYHQLTAMNIKCQVIAPSRIPKSPTDRIKNDHRDAISLARLLRAGELTPVWIPDLTHEAMRDLIRARAAAKRDSRVARQRILSMLLRTDKHYAGKHWTGKHRTWLANQSFSQPSQQIAFQHYCQSLEQIEDRILQLDQEISRLLPEWSLCNLVCQLQALKGVGQLIAITLVAELGDFSRFSNPKQLMAFLGLVPGEYSSGNSIRPRGITKVGNSELRRLLYEAAWSYRTPAKVGAWLIYYRPDSVTQYSKDIAWKAQQRLCSRYRSLTAKGKKSQVAITAVARELTGFMWDIALAAQSSFSQQKQN

SEQ ID NO: 547 - DNA, 2278 bp, Escherichia coli
tattcgggcactaatctgaaaagtttgcccactgcttttctcccatcttctgcgcaataatgcccggcaaaatatcccctctccgttctgtaaaagcatttatacaagaagaaaattgttctgccggttgctctggccctgatgggtgtaaattcggacgtttatgcggccgatgtaaatatcgatattttaagtgcgacagtgaaagataaacgcattgagggagtatcggtgacgctgcaacgcaatggcgcacaatctgtttctggaaccacaaatgcatcgggcagcgttaatctgggttctacatttgctgatgatcaagatgctttattgatcgtcaaaaaagagggctattctaatctggtggtcaaatgttcgtgtgctggcatgacttatgcgattagtccggcaatgactagtctggatggcatgcgtgtagttttgagctggggcgaaaagccttttgatcttgattcacatttgatcttctctggcggacatatctattttgatagtaaagaggggactgatgctaatctggatgttgatgatacggatagctatggaccagaaactgtcactatcagcaaaaagcattttggcgaaagttacatctatgccgtgcaggactatagcaataaagggttgcccaacagtaattatctctctgccagtaaggcaaaagtgtttgtttatgtagggagctccctggtgcgtagttatagtgtccctgctggaaaacgagggaacatctggaccgtgtttaaactcaatccaaacggcgagtttgaagatatcaactctgttaccagcgccaattttaacgacaccacattagacgtcagggatttagccactgtgataatgcctgcgacggactcttcagctccggcttcgcctgcgatgcaaaacagtggagatactcaactggcaagaaaatataatcgcgaaggtgaagctgtttataaaaccggtcaacttgagcaagccattcaactcttccaacaggcaacagaattagacggcaattacggacaggcatttagtaacctggggctggcgtatcagaaaaatggcaacatagcggaagcaatttaggcaaatcgtaaagcgatctcgttagcctgtggagcaaatgcggcgacaacgcgcgctaactcctattataacattgccaaaatttatggaactgctggacaggacgctgatgcattgcagcattatcaactcgctcttcacgatgccattttataataatgaaagtggaatcatatttttaaattttatattcttgcttgtttttctggtgaagttatccatcattcactgttctattatcttaaggatgatggaaatagaaggttttttaatgataataaaacatattcttatgttatttaatcacgaattttttaatatgattatgtatcaatacattatattacccgatgtgttactgaattatcgactattactttaatatttagtgatcgtaaacatggttctccagattactcaatttcggcatcttacaatatcatcatcttcaaatagttaaattaagattattgcactgccaaaacagataaattgaagcagctggtagatattgcagaacaaccttgattcaacggcgaaatcgtatttatcctccaggttgccgccatatggagttgaatatcattcagtccacgcttgatgagtcgatatcgctatatccatagacagggtagctttttacacgagagtgtccggtgttttctaacgggctggcaatcattccgttttgttgtttcgtatcactgctataacaatttctcttgattttcaatctttgagctaatcattgaatacagatcgggaaatattaataccatatatgttttattttgaaaatccttgttccatctgactatacctaaggtatctatttcttcttgtgattattaccaatgaaacaataagtgacggatttacagtacgttgctcataaagacaacaatcaattaacgttgataaaaatatgttatgtaaaatggcaataaagtagctactctaactaattagtattataaaaagtcgataaagcggctctgttaaataaaatactggttttttatctatatatttccatgtgggtaattttactgtgctattttgttacaataaattaacaataaagttaccagtggctcatgattcacacataattaacatatgtggttgattttgatataaatcaatttttaattcttgaaaaaaatctgcaaaacac

SEQ ID NO: 548 - DNA, 978 bp, Escherichia coli
ctgccggttgctctggccctgatgggtgtaaattcggacgtttatgcggccgatgtaaatatcgatattttaagtgcgacagtgaaagataaacgcattgagggagtatcggtgacgctgcaacgcaatggcgcacaatctgtttctggaaccacaaatgcatcgggcagcgttaatctgggttctacatttgctgatgatcaagatgctttattgatcgtcaaaaaagagggctattctaatctggtggtcaaatgttcgtgtgctggcatgacttatgcgattagtccggcaatgactagtctggatggcatgcgtgtagttttgagctggggcgaaaagccttttgatcttgattcacatttgatcttctctggcggacatatctattttgatagtaaagaggggactgatgctaatctggatgttgatgatacggatagctatggaccagaaactgtcactatcagcaaaaagcattttggcgaaagttacatctatgccgtgcaggactatagcaataaagggttgcccaacagtaattatctctctgccagtaaggcaaaagtgtttgtttatgtagggagctccctggtgcgtagttatagtgtccctgctggaaaacgagggaacatctggaccgtgtttaaactcaatccaaacggcgagtttgaagatatcaactctgttaccagcgccaattttaacgacaccacattagacgtcagggatttagccactgtgataatgcctgcgacggactcttcagctccggcttcgcctgcgatgcaaaacagtggagatactcaactggcaagaaaatataatcgcgaaggtgaagctgtttataaaaccggtcaacttgagcaagccattcaactcttccaacaggcaacagaattagacggcaattacggacaggcatttagtaacctggggctggcgtatcagaaaaatggcaacatagcggaagcaatt

SEQ ID NO: 549 - protein, 326 aa, Escherichia coli
LPVALALMGVNSDVYAADVNIDILSATVKDKRIEGVSVTLQRNGAQSVSGTTNASGSVNLGSTFADDQDALLIVKKEGYSNLVVKCSCAGMTYAISPAMTSLDGMRVVLSWGEKPFDLDSHLIFSGGHIYFDSKEGTDANLDVDDTDSYGPETVTISKKHFGESYIYAVQDYSNKGLPNSNYLSASKAKVFVYVGSSLVRSYSVPAGKRGNIWTVFKLNPNGEFEDINSVTSANFNDTTLDVRDLATVIMPATDSSAPASPAMQNSGDTQLARKYNREGEAVYKTGQLEQAIQLFQQATELDGNYGQAFSNLGLAYQKNGNIAEAI

SEQ ID NO: 550 - DNA, 351 bp, Escherichia coli
gtggagcaaatgcggcgacaacgcgcgctaactcctattataacattgccaaaatttatggaactgctggacaggacgctgatgcattgcagcattatcaactcgctcttcacgatgccattttataataatgaaagtggaatcatatttttaaattttatattcttgcttgtttttctggtgaagttatccatcattcactgttctattatcttaaggatgatggaaatagaaggttttttaatgataataaaacatattcttatgttatttaatcacgaattttttaatatgattatgtatcaatacattatattacccgatgtgttactgaattatcgactattactt

SEQ ID NO: 551 - protein, 117 aa, Escherichia coli
VEQMRRQRALTPIITLPKFMELLDRTLMHCSIINSLFTMPFYNNESGIIFLNFIFLLVFLVKLSIIHCSIILRMMEIEGFLMIIKHILMLFNHEFFNMIMYQYIILPDVLLNYRLLL

SEQ ID NO: 552 - DNA, 156 bp, Escherichia coli
atggtattaatatttcccgatctgtattcaatgattagcagtgatacgaaacaacaaaacggaatgattgccagcccgttagaaaacaccggacactctcgtgtaaaaagctaccctgtctatggatatagcgatatcgactcatcaagcgtggac

SEQ ID NO: 553 - protein, 52 aa, Escherichia coli
MVLIFPDLYSMISSDTKQQNGMIASPLENTGHSRVKSYPVYGYSDIDSSSVD

SEQ ID NO: 554 - DNA, 7654 bp, Escherichia coli
ctaacgtctccccaagtctactcaagtatttaaaaacctcttataatcagtatattaatgccccttttagtcttttgacgtctatttaagtaccccaaactctacaagcaattgaggggatttgctgttcagtttagtggagatacccccaagtgaaactcaatgcccgtcaaatagacactgccaagccaaaagagaaggcttacaagttggctgatggtggtggtctgtacctcctggtaaaacctggtggaggagaatattggcgtctcaagtatcgtgtagctggtaaagagaagctgttagcactaggtgtgtatcctgaggtcaccttagctgatgctcctgcaaaacttgaagaagctaaaagaggtatctctgggggaatcgatctgatggaagtgaagcgagaggaaaagattgcccgggaaacgcagttaaacaacaccttcaaagatattgcccttgagtggcacagtaacaaattataatcacaataatagtgtatataattatacattgtatgcttggtaatcatataatgataaaagcttccgataatcagtatgagatttgtccttaaactcctggacatgcttttctaaatcttccaatggtatatgtccatttatacaaataaaattctagtgataaataccttcaggtatgattagacaacatctttattcgatgggggttaatctatatttgatatctttcttttaaataacaacgccattaaaaacgctttgtttaatgacgtttttttattgtttcctatataaagcctaaccagcataaacattggtggctcttatgctcattgtaattaaatgagagtgtgattaatgtctttatatattctggtagttattctctccagaagaatacattgtaagaagatgactgttagtatgttttaacatcaattaacattaaggtttgataataattttttgttggcgagttcaaatgttttcatttcatcatctgatagcccgctccagattttctttagcattacattttgagtgtttattagtttttgagcaagtgtaactccgtcaggggttaagcaaatacttttgcttcgacgatcgtttttattattaattcttttggcaatattctttttttctaatttgtctatgatgtgtgtgatgtttgttttggagaattgtaactccttgtaaatatcagaaggggactgacaataatcatcagacatatataatgaaactaacaccataaatgttgaggtgtttattctatactcgctcaattcattttctataatactctggattttgtcatttactctaatatataagtgtattaacagactctcctgagccgggtatgccggatttttgatttttttgtagtttgttatagtttttaataaatctatattattcataattccaccacacggcaaaagaaaactcatgaagattactcaacctgagtgttacatgaagtatcgtgaacgccggaaaatctaagttccagcctgtaccgtaatcagataatcgcagcaaagggacaaagcaatagtccctttgctgcacagcatcagaatgaataacgaatattagcgtttatcgcatcatctgtgttgtatttaccgaatgcagagcgttcaacttccagccccagacgcgtattgtcgccaaaccgggcatttaaccccacaccgtaaagcatacgaccgtcttttctgccattaatctgatgttctcccgctgcatccttcaggtgaacgtcagcactgtccgtcagatcgaactcataatgcaggccggcacgggctgtcagactccagtccttaccactgaaggttttaccggaaacaacgccggttctgcctaccagaggattaacgctgttacgacgcattgagacatccattccactgtcgttccagttaaatgtttggccctgcagtcttccccagaccagttccgcctgaggttcaacaaacgtcgtatctgtcagatgataacggtatccgacttctgcacctgcatacagtgaatggctgcggaagttctgtttaccagctccggcaaagttcaggtcatatttgttttcattgtgaatatatttggcaatcaaatcaaagtaagcgccggaccggaacagaccactggcatagaaaccaccaccccatgattttgttttaccgctgtacaggcctgctgacgcatctgtgtcagtgtaggtggccatcacgccggtaaacaggtccatacttcccagttcgtgcttacggtcagcccccatctgcagcagggtatagtggtcagtgaaaccgccatcagcagagccggaaccgttcagcagacgcacccacgtaccggcttcgccgttaatatccctcaaatcgcccatgcgtttgttcaggttgttaacttcagtgatgaagttgttatagctgatgtgcatgaatgtggcggcagccttaccctggccgtcgttacgtgcaacctggtaaccatcgaggacccactcttttttcccgtcctcttttctgacactaagggtgggggtgacatcactgaatcccacaacccgtgttgatgccctgaacagattatcagctgtcgcttcaggtgcgctgaccagtggaatatcaagcgtgtccttgtcagagggttttttcaggaagttaacccagatgctgttgtcatgacctgttgccgacttgtttatcaccagtttgtctgccttgttaaggtctgtacgcatgacaaatgctgactgaaccgcgtccagattatctgttgtcagtgtcgtgaacgatgatgttcccccgttaaaaccgactattgtccggttaagtttcatatttcctgccgtggagtttccgttcatcgaccactgggtgtctgtcatgctgacggtggcatccggtgcattcaggctcccgctccaggtattgcggtacccgttaaacaggctgtacaacatctgattctgaagagtcaggtcaggactcagttccccttcccctccgagggtgacagtccctttatcctgaacattgatattacctgacaacatactgtacggccccacgttcaggcgggcatcgtctcccttcaggttccatgaaccggcataatcgtatacaggtaaaagtgtgtgagatacctcatcaggacggctgttcagactcagggtggcatcagaaatattcaccggaccgtcagaaacaaaactctgactggccagaacatttgctcccttgttcagattcagggcggtactggtcagcgttgagttctccagaacggcactgtctgaggagatattcacggtactgttgttcgcctgtattccgccattgaatatctcattgatattcagcactgactgattatccaggttgacggtgccgttgaagacgcttttatctgcatctttagttgcaacagatgtgccttcttcaagggtaaatgctgttccctggccatcttttttgtcgataaatacccgactgtcgcccagcgtgacgctggagttatctgcctggatggttgtgttcagtgtggcattgcggcccagaccaaagtctgtatcttttaacacgagcgaaccaaagctgaacgtcctgttctcccagtcatcctgtgtaaatgaggtgggctgtgtcagaacggaattgtcgcccagagacgagactgtatttgcaatactctgagacgttgaagcatggataaccgggtggccctgaatggtcagacgaccgttttcctgagtaaatgtaccggacatattcgctgagccgtccataaccaatgcgccggttgtacccggggttgctttatttgagaaattaatatttcccagcaacttgccatgatacagataccctttattattaattctgtttgcaagcagtgcctgtgcactgttctggtcatgtccgacatattcccagtgctcgttactgacctgaccggtagggaaccagccataactacttgttttcaggataaaataatcgacggtatgagtatagggattattataaatatataatgaacctactgttcccctgtttgatgatgaccattcattaacttttacgtctgccggacgcgtctgataatccagagtgatattagccgttttatcactgctgttaccgagagttgcgccataatcggcggcattcagcttatgaaatgtcaggtcattcccgttaacatccagaacccccccccggtagccccaggatatattgtccggattaacctgctggttgtctgccagcacgactgtcgggcggccgctggcaatattcacgctactgaatgcctgaacgtgtcctgaactgtcagcctgctgattgaggacaacggtcccatccccgactttcaggccgccctcattaacaccggttccctgtacaaccagggttccttcgccgattttatgcaggttgtcacctttcacaccattaacctgccagtttacggaggcatccttgtccacaataataccggccccggtccaggtacttccgtttgaagtggtgacagtgtagtcatcagtaaatgtcagtgaaccggcaccctgcgtgacagagttttccaggtcaatctgaccattatgtcccaggaatgtcagatttttacctgcgttcaggtcagaacctttttgcccgtgcatggcatattcatcggaaccctgtttcagagagccagtgccggtgctgctgtcaaatttccattgcaggggggcgccggatgaggcattaaaaaagacgggagcgtcattatcctctgaatagatctgtgagagaaaactctgaggaataagagaatatatcaaattggtcccccctcctactcccgagtaaacaccgaccagttcccactgccctttggccgtattccagccaaataatggagaaccactgtcgccggcctctccaaaagagggcaggatgctatgatcatgtatgttgccccccatatacagctgaatgccgtctgagccgtgataaaagaatgatgtcgggagtattcctcctgtcagataaccatacccacctgttacccaatgtcgcttaccctgactatcctgaatatactgacttcccgaaccagccctgtagaatgccgagtattttgaagggttcaatatatcagctgttgatgagctggttacggtagccggagcaacctcagttacgagcttatcaagtcttggtgtgtggagatcagatgaactgtgttcattacgatccacaatatggtaactgttctgaccatcaccgaagctgacgctctgatatcctttattatgttttacactggctatatattgcgggttaattaatgttgcaacgccgggatttgagcttacattcacactgctaaaatcaaccatgggcgctttatcaagatgtcctactaattcccctttattattaaaaataggaatgtttgttgcgccagcctgaaactgccctttgttttctgcaaagtcgcggtatgtctggtaaggattgttgccaccaaccgttgatgcaccagcaacggttgggagtaatgcagatagtgccagagaggtaagtactgaaagtctttttcctctgcgggtactccctttacatacccttcgggctagttcagagacaacctttactgtgttagtaatataacaatattttagagcgtatattttattcatagtaaatgattccggaacgtatattccaaagttacattaataaccatagacaatttcaaacgaaagtattgttgaattgcgcgctaattattaattagctatataattataaatgtgatatatgtcacatttatttttgcttaaaactacaatattttgtagttgcacgcattctttgtctgtggttttcgttggtggtaatgaaaatgttgtttgctttttctcaggtgttttgacttatgacttaaagtcataaaatatgcgacgctaatacaactacagaaaaatggtatatatggatatcgacgatatttgttgatttttattttaaattgcgtggcggttcagagcggatatatatatcaccataccatcatctgtttttctgaagttcagattagttttaacacactgttttccatcttcgttgattacaacagtctttttaatgtatttacgaatggcatcattcgacgttctaacggatttagtcgatggtggggtaattaataaaacatttgctgtaatcaaaaacggtaatgtcttcaattgatagaagtttctggtaatctactggtatttaaggttttccatggctaccgttactgttcattgtccgcgctgtaattccgataaagtttatcgacatggtcgtagttgttcccagcatgagcgtttccgttgtcgttcatgtaaacgtgttttccagctcacttactcttatgaagccagaaaacccggctttaaggagctgatcgttgaaatggcgcataatggcacaggggccgtgatatcgccagaacactgaaaatcagcatcaataccgtcatacggacattaaaaagctctcgccccagcggataacatctgcgtcagtcagctcacgctgatgttgcccttatctgtgaacttgatgagctgtggagcttcgttggcaacaaggcgcaacaacactggctctggtatgcgtagaacactaaaactggcggtgtgttggcttacactttcgggccacggaatgatgaggcctgtcgggaattgttagccctgttgactccgttctgtatcggcatggtggccgcgatgactggggcagctacgccagagaagtgccgaaggagaaatacctgaccggcaaaatcttcacgcaacgtattgaacgtaacaacttgaccctccgcacccgcatcaagcggctggtaagtaaaacaatctgcttctcgcgttccgttgcaatccacgaaaaagtcatcggttccttcattgaaaagcacatgttctactgattggaagcactacccaacgttcaacttatcatcataagtataaaaatcacaaaatgggaggtaagagtctttacctggattgtctcgaaatgcaaagtgtgcttgctttacaactaaatctgggggtatctaatgattgcgtaatagtttttttatatacatatcaatgtcttgctttttacaatctgtttatattatccattttaaatcaataggttacacatcgttaataccttccttattttttgattgggacagatttgggaccgatgggttcaggatcgaatctatttaccgtgcgtgttcggtaaggtgattaggtgcgagatgagcatatcgacgaaccatttcgagagtttcctatccgctcatttttaagtgcaagcagggaaacaccggaccaaaccaatcagctgttcgaaaatggcaagcggattaatatgccatggcggctttgagccgcacgcatggggtgtggcaagcctgatggatgttactgtgcttgtggtggcgtctttgctggtctggttgttggttaatcgcgaaaatcattatgcctgaggaataccacaggacgttcaggttttgcataaaaaagcccaccattaaggtgggcaaaaggaatgatttatattctctgagagaaacattacatttctcct

SEQ ID NO: 555 - DNA, 336 bp, Escherichia coli
gtgaaactcaatgcccgtcaaatagacactgccaagccaaaagagaaggcttacaagttggctgatggtggtggtctgtacctcctggtaaaacctggtggaggagaatattggcgtctcaagtatcgtgtagctggtaaagagaagctgttagcactaggtgtgtatcctgaggtcaccttagctgatgctcctgcaaaacttgaagaagctaaaagaggtatctctgggggaatcgatctgatggaagtgaagcgagaggaaaagattgcccgggaaacgcagttaaacaacaccttcaaagatattgcccttgagtggcacagtaacaaatta

SEQ ID NO: 556 - protein, 112 aa, Escherichia coli
VKLNARQIDTAKPKEKAYKLADGGGLYLLVKPGGGEYWRLKYRVAGKEKLLALGVYPEVTLADAPAKLEEAKRGISGGIDLMEVKREEKIARETQLNNTFKDIALEWHSNKL

SEQ ID NO: 557 - DNA, 522 bp, Escherichia coli
atgagttttcttttgccgtgtggtggaattatgaataatatagatttattaaaaactataacaaactacaaaaaaatcaaaaatccggcatacccggctcaggagagtctgttaatacacttatatattagagtaaatgacaaaatccagagtattatagaaaatgaattgagcgagtatagaataaacacctcaacatttatggtgttagtttcattatatatgtctgatgattattgtcagtccccttctgatatttacaaggagttacaattctccaaaacaaacatcacacacatcatagacaaattagaaaaaaagaatattgccaaaagaattaataataaaaacgatcgtcgaagcaaaagtatttgcttaacccctgacggagttacacttgctcaaaaactaataaacactcaaaatgtaatgctaaagaaaatctggagcgggctatcagatgatgaaatgaaaacatttgaactcgccaacaaaaaattattatcaaaccttaatgttaat

SEQ ID NO: 558 - protein, 174 aa, Escherichia coli
MSFLLPCGGIMNNIDLLKTITNYKKIKNPAYPAQESLLIHLYIRVNDKIQSIIENELSEYRINTSTFMVLVSLYMSDDYCQSPSDIYKELQFSKTNITHIIDKLEKKNIAKRINNKNDRRSKSICLTPDGVTLAQKLINTQNVMLKKIWSGLSDDEMKTFELANKKLLSNLNVN

SEQ ID NO: 559 - DNA, 4128 bp, Escherichia coli
atgaataaaatatacgctctaaaatattgttatattactaacacagtaaaggttgtctctgaactagcccgaagggtatgtaaagggagtacccgcagaggaaaaagactttcagtacttacctctctggcactatctgcattactcccaaccgttgctggtgcatcaacggttggtggcaacaatccttaccagacataccgcgactttgcagaaaacaaagggcagtttcaggctggcgcaacaaacattcctatttttaataataaaggggaattagtaggacatcttgataaagcgcccatggttgattttagcagtgtgaatgtaagctcaaatcccggcgttgcaacattaattaacccgcaatatatagccagtgtaaaacataataaaggatatcagagcgtcagcttcggtgatggtcagaacagttaccatattgtggatcgtaatgaacacagttcatctgatctccacacaccaagacttgataagctcgtaactgaggttgctccggctaccgtaaccagctcatcaacagctgatatattgaacccttcaaaatactcggcattctacagggctggttcgggaagtcagtatattcaggatagtcagggtaagcgacattgggtaacaggtgggtatggttatctgacaggaggaatactcccgacatcattcttttatcacggctcagacggcattcagctgtatatggggggcaacatacatgatcatagcatcctgccctcttttggagaggccggcgacagtggttctccattatttggctggaatacggccaaagggcagtgggaactggtcggtgtttactcgggagtaggaggggggaccaatttgatatattctcttattcctcagagttttctctcacagatctattcagaggataatgacgctcccgtcttttttaatgcctcatccggcgcccccctgcaatggaaatttgacagcagcaccggcactggctctctgaaacagggttccgatgaatatgccatgcacgggcaaaaaggttctgacctgaacgcaggtaaaaatctgacattcctgggacataatggtcagattgacctggaaaactctgtcacgcagggtgccggttcactgacatttactgatgactacactgtcaccacttcaaacggaagtacctggaccggggccggtattattgtggacaaggatgcctccgtaaactggcaggttaatggtgtgaaaggtgacaacctgcataaaatcggcgaaggaaccctggttgtacagggaaccggtgttaatgagggcggcctgaaagtcggggatgggaccgttgtcctcaatcagcaggctgacagttcaggacacgttcaggcattcagtagcgtgaatattgccagcggccgcccgacagtcgtgctggcagacaaccagcaggttaatccggacaatatatcctggggctaccgggggggggttctggatgttaacgggaatgacctgacatttcataagctgaatgccgccgattatggcgcaactctcggtaacagcagtgataaaacggctaatatcactctggattatcagacgcgtccggcagacgtaaaagttaatgaatggtcatcatcaaacaggggaacagtaggttcattatatatttataataatccctatactcataccgtcgattattttatcctgaaaacaagtagttatggctggttccctaccggtcaggtcagtaacgagcactgggaatatgtcggacatgaccagaacagtgcacaggcactgcttgcaaacagaattaataataaagggtatctgtatcatggcaagttgctgggaaatattaatttctcaaataaagcaaccccgggtacaaccggcgcattggttatggacggctcagcgaatatgtccggtacatttactcaggaaaacggtcgtctgaccattcagggccacccggttatccatgcttcaacgtctcagagtattgcaaatacagtctcgtctctgggcgacaattccgttctgacacagcccacctcatttacacaggatgactgggagaacaggacgttcagctttggttcgctcgtgttaaaagatacagactttggtctgggccgcaatgccacactgaacacaaccatccaggcagataactccagcgtcacgctgggcgacagtcgggtatttatcgacaaaaaagatggccagggaacagcatttacccttgaagaaggcacatctgttgcaactaaagatgcagataaaagcgtcttcaacggcaccgtcaacctggataatcagtcagtgctgaatatcaatgagatattcaatggcggaatacaggcgaacaacagtaccgtgaatatctcctcagacagtgccgttctggagaactcaacgctgaccagtaccgccctgaatctgaacaagggagcaaatgttctggccagtcagagttttgtttctgacggtccggtgaatatttctgatgccaccctgagtctgaacagccgtcctgatgaggtatctcacacacttttacctgtatacgattatgccggttcatggaacctgaagggagacgatgcccgcctgaacgtggggccgtacagtatgttgtcaggtaatatcaatgttcaggataaagggactgtcaccctcggaggggaaggggaactgagtcctgacctgactcttcagaatcagatgttgtacagcctgtttaacgggtaccgcaatacctggagcgggagcctgaatgcaccggatgccaccgtcagcatgacagacacccagtggtcgatgaacggaaactccacggcaggaaatatgaaacttaaccggacaatagtcggttttaacgggggaacatcatcgttcacgacactgacaacagataatctggacgcggttcagtcagcatttgtcatgcgtacagaccttaacaaggcagacaaactggtgataaacaagtcggcaacaggtcatgacaacagcatctgggttaacttcctgaaaaaaccctctgacaaggacacgcttgatattccactggtcagcgcacctgaagcgacagctgataatctgttcagggcatcaacacgggttgtgggattcagtgatgtcacccccacccttagtgtcagaaaagaggacgggaaaaaagagtgggtcctcgatggttaccaggttgcacgtaacgacggccagggtaaggctgccgccacattcatgcacatcagctataacaacttcatcactgaagttaacaacctgaacaaacgcatgggcgatttgagggatattaacggcgaagccggtacgtgggtgcgtctgctgaacggttccggctctgctgatggcggtttcactgaccactataccctgctgcagatgggggctgaccgtaagcacgaactgggaagtatggacctgtttaccggcgtgatggccacctacactgacacagatgcgtcagcaggcctgtacagcggtaaaacaaaatcatggggtggtggtttctatgccagtggtctgttccggtccggcgcttactttgatttgattgccaaatatattcacaatgaaaacaaatatgacctgaactttgccggagctggtaaacagaacttccgcagccattcactgtatgcaggtgcagaagtcggataccgttatcatctgacagatacgacgtttgttgaacctcaggcggaactggtctggggaagactgcagggccaaacatttaactggaacgacagtggaatggatgtctcaatgcgtcgtaacagcgttaatcctctggtaggcagaaccggcgttgtttccggtaaaaccttcagtggtaaggactggagtctgacagcccgtgccggcctgcattatgagttcgatctgacggacagtgctgacgttcacctgaaggatgcagcgggagaacatcagattaatggcagaaaagacggtcgtatgctttacggtgtggggttaaatgcccggtttggcgacaatacgcgtctggggctggaagttgaacgctctgcattcggtaaatacaacacagatgatgcgataaacgctaatattcgttattcattc

SEQ ID NO: 560 - protein, 1376 aa, Escherichia coli
MNKIYALKYCYITNTVKVVSELARRVCKGSTRRGKRLSVLTSLALSALLPTVAGASTVGGNNPYQTYRDFAENKGQFQAGATNIPIFNNKGELVGHLDKAPMVDFSSVNVSSNPGVATLINPQYIASVKHNKGYQSVSFGDGQNSYHIVDRNEHSSSDLHTPRLDKLVTEVAPATVTSSSTADILNPSKYSAFYRAGSGSQYIQDSQGKRHWVTGGYGYLTGGILPTSFFYHGSDGIQLYMGGNIHDHSILPSFGEAGDSGSPLFGWNTAKGQWELVGVYSGVGGGTNLIYSLIPQSFLSQIYSEDNDAPVFFNASSGAPLQWKFDSSTGTGSLKQGSDEYAMHGQKGSDLNAGKNLTFLGHNGQIDLENSVTQGAGSLTFTDDYTVTTSNGSTWTGAGIIVDKDASVNWQVNGVKGDNLHKIGEGTLVVQGTGVNEGGLKVGDGTVVLNQQADSSGHVQAFSSVNIASGRPTVVLADNQQVNPDNISWGYRGGVLDVNGNDLTFHKLNAADYGATLGNSSDKTANITLDYQTRPADVKVNEWSSSNRGTVGSLYIYNNPYTHTVDYFILKTSSYGWFPTGQVSNEHWEYVGHDQNSAQALLANRINNKGYLYHGKLLGNINFSNKATPGTTGALVMDGSANMSGTFTQENGRLTIQGHPVIHASTSQSIANTVSSLGDNSVLTQPTSFTQDDWENRTFSFGSLVLKDTDFGLGRNATLNTTIQADNSSVTLGDSRVFIDKKDGQGTAFTLEEGTSVATKDADKSVFNGTVNLDNQSVLNINEIFNGGIQANNSTVNISSDSAVLENSTLTSTALNLNKGANVLASQSFVSDGPVNISDATLSLNSRPDEVSHTLLPVYDYAGSWNLKGDDARLNVGPYSMLSGNINVQDKGTVTLGGEGELSPDLTLQNQMLYSLFNGYRNTWSGSLNAPDATVSMTDTQWSMNGNSTAGNMKLNRTIVGFNGGTSSFTTLTTDNLDAVQSAFVMRTDLNKADKLVINKSATGHDNSIWVNFLKKPSDKDTLDIPLVSAPEATADNLFRASTRVVGFSDVTPTLSVRKEDGKKEWVLDGYQVARNDGQGKAAATFMHISYNNFITEVNNLNKRMGDLRDINGEAGTWVRLLNGSGSADGGFTDHYTLLQMGADRKHELGSMDLFTGVMATYTDTDASAGLYSGKTKSWGGGFYASGLFRSGAYFDLIAKYIHNENKYDLNFAGAGKQNFRSHSLYAGAEVGYRYHLTDTTFVEPQAELVWGRLQGQTFNWNDSGMDVSMRRNSVNPLVGRTGVVSGKTFSGKDWSLTARAGLHYEFDLTDSADVHLKDAAGEHQINGRKDGRMLYGVGLNARFGDNTRLGLEVERSAFGKYNTDDAINANIRYSF

SEQ ID NO: 561 - DNA, 219 bp, Escherichia coli
ttgaagacattaccgtttttgattacagcaaatgttttattaattaccccaccatcgactaaatccgttagaacgtcgaatgatgccattcgtaaatacattaaaaagactgttgtaatcaacgaagatggaaaacagtgtgttaaaactaatctgaacttcagaaaaacagatgatggtatggtgatatatatatccgctctgaaccgccacgcaatt

SEQ ID NO: 562 - protein, 73 aa, Escherichia coli
LKTLPFLITANVLLITPPSTKSVRTSNDAIRKYIKKTVVINEDGKQCVKTNLNFRKTDDGMVIYISALNRHAI

SEQ ID NO: 563 - DNA, 213 bp, Escherichia coli
atggctaccgttactgttcattgtccgcgctgtaattccgataaagtttatcgacatggtcgtagttgttcccagcatgagcgtttccgttgtcgttcatgtaaacgtgttttccagctcacttactcttatgaagccagaaaacccggctttaaggagctgatcgttgaaatggcgcataatggcacaggggccgtgatatcgccagaacac

SEQ ID NO: 564 - protein, 81 aa, Escherichia coli
LVIYWYLRFSMATVTVHCPRCNSDKVYRHGRSCSQHERFRCRSCKRVFQLTYSYEARKPGFKELIVEMAHNGTGAVISPEH

SEQ ID NO: 565 - DNA, 255 bp, Escherichia coli
ctgtcgggaattgttagccctgttgactccgttctgtatcggcatggtggccgcgatgactggggcagctacgccagagaagtgccgaaggagaaatacctgaccggcaaaatcttcacgcaacgtattgaacgtaacaacttgaccctccgcacccgcatcaagcggctggtaagtaaaacaatctgcttctcgcgttccgttgcaatccacgaaaaagtcatcggttccttcattgaaaagcacatgttctac

SEQ ID NO: 566 - protein, 85 aa, Escherichia coli
LSGIVSPVDSVLYRHGGRDDWGSYAREVPKEKYLTGKIFTQRIERNNLTLRTRIKRLVSKTICFSRSVAIHEKVIGSFIEKHMFY

SEQ ID NO: 567 - DNA, 216 bp, Escherichia coli
ctgattggaagcactacccaacgttcaacttatcatcataagtataaaaatcacaaaatgggaggtaagagtctttacctggattgtctcgaaatgcaaagtgtgcttgctttacaactaaatctgggggtatctaatgattgcgtaatagtttttttatatacatatcaatgtcttgctttttacaatctgtttatattatccattttaaatcaa

SEQ ID NO: 568 - protein, 72 aa, Escherichia coli
LIGSTTQRSTYHHKYKNHKMGGKSLYLDCLEMQSVLALQLNLGVSNDCVIVFLYTYQCLAFYNLFILSILNQ

SEQ ID NO: 569 - DNA, 5999 bp, Escherichia coli
ttatagcctgcaggcagcatactgctgcctgcagggggtataacagtcgacaggggaaccgactgctttattcttaccaggtcacattgataccaactacaccctgtagcgggttctcaatgtcgtcacctttggtgtagtcaaggcttgcatatgctcccatgtttttggtgatatcagcttgtacacctgcacccacgcggaatgctgcaccgtcaatgctggcattgacagactcatcacccagacggactttgttgccatcagagaattcgttcagtgcggccagattcagataaggtttaacggtcgcgttgcccacagcgaagtcataacccacgcgcgtaccggcctcacccagcacagagttatagctgtcagaatgaacgtccacgccgttgagttgataatccacaccttccagagtcagagcagacagtttggcatatggctgaataaacaggccattaccgtctttccatgtgtaaccgcctttaaccatcgcaccaaaaccattggtgttaaagtcagctttgatggtaccgccaccattcatcaggcgaacatctgccgtgttgctgtagtgaccaaactgtgcagcagtatcaatgaagataccgttgttatactggcggctcaggtaagcgtggaagctgtaaccttcagtgtcacctttgctctgcatggtagtcatgtcacctttcgcagaagacatcgccacaccggccagccagctaccatcttcagtcatgaagcgggtatcaccacccagcattacaccatttacatccaggtcataggatgcatttcccgcggtggtatgtttctgtttaccgccaaagtactgaatccatacgccacccttgtcattttcgctcagacggacagcatcctgacgggcggagagcgtgtcagcctgcagattagcgacgttagccggagcagctgccattgcctgaatcacggagctggcgttggatgctttatgcgtgttttttacgaaataaaagttaccatcagctccctgtgtcaggtcatattgatacagaccaccttccgttgtgcctgtggcttttagagtgctgtctttgccggtagaaataaatgccgtttgttcattgataagatccaatgaacccgcactgtaaacacgcaagtcaccgctcgctttaccgctgatatccagagtgttttcagaagaggcatcaacaatcagagtgccgttttgagaagcaaacgtgccagtattgactgtagccttcgtgatattaaccgtactgtcttttactgccagagcatcaacagttgaggaacccgtaacattccagacagacccgttttgcagagatacactggcatctcctgcccctgaaactttgcctttccagactgaactatcggaaagatttatatccagatcactacccgctttatcgccgctattgaaggtataagcattaccttcccagtaagagcgggcaacgttcatatttacatttgttgtggtactggctgaattctcgctttcagaaagggccaggacatcagagtagatggttgaatcagcaacagacaaatttaaattttgcgttgctgaacctgcgccttgtgccgaagcagaggcataaattgtttgtttattattagccgccccaattactgagccatccttaatattcaggttgactgtatgaattcccgtcttattcccggcagtaactattgtttcaatcccgccattaataatatttgagtcagcaagggtgatgttgtcggttgcatcaccgtcaaaaccctgcaacaaattacccttttgagcaaaaattgccgtagagccgttgctgtaactcttattaccttgagcatttatggttgtaccattgagcgttaaattatttcccgtggtcgcttccagagatatccctgtcgcactacctttttcattttttgcaacgaaattaccgccattaacaacaacatcgccagttgaatcaatgaccattgcagtccggacataggtgccttcaccttgagctgtgatggtggagtctgtagcattaatcacaacatttttgttaccactaacttttacaccttcaacgaaatcttggtttaccgttgatgcggcggtaatatcgtgaccgccaaaagtaacattaaggtctttatctgaatctgacgtttcaattgttacggctgtaatcttgttatcaccgttaataacaacatcttgatccagagtcgtcttctctgtattcagcgtaaccggatcagttgataccgtgctatcagtagcgaatgctggtgcagaaagagccataacaatagctgtcgctaatgcgctgcggtaaaataccttactgtttttcatgaagaaattctccattctggtaactaatttcaatttcccacttatttatatttatgcagagataaagcctgcgtccctgcatttaccaccacggaatacctgttggtatttccgttttcacgcaatgtcatggcattcgttgtttccaatgcatttccatcaccgtgaaaattattgctgctcagcagcagggcttcccgcaatgacatgctgtccggtattccccaacgcttttttagcgactgctcggcaagccatatctgtcttatccccgttttgagaaactgcgcactgtattcccagctgtgtccggcaagaagtaacgacaacaccttcttttgcttttccgggaagcgttctgacatgacgattgtctttgtgcagttattcacctctttcataaagacagagtaactgtccataactggcaaaatttctgcatgcttcagccctgaaaacccaccagaggcatttgcaatactgatgacacgctctactgacattcctggtttcagtaacctcaggtttttgagaacgccagaaacatccggtggcagaaaaaagggcgcgacgcacaacaccaccacgaatgagtgatcccgataaaatcggaaccacatttcagcgcattcggcaggtcgccctgccgatatcacgacactctgtggcctgtgcccgcaatttattgcgtaactcctccttctgttctgatgcaggtaacattgccgacagaaccggttgatagagctgcgaactgcgctggtacaattccctgagggacagaaaagaacgaaacgcatccttccctcacagatgtcagtacgccagcacgctgtacaggctgtacagcgtgcctcccaatcctgcagcccagaacagtagaaatattttggctcctacactgtagcgagtccggtatgcgccgcagtgggtggtagtaacaacgctgctgtgtcataacaatcctggtctttttttagatatattttttctttgtccggaaagtacttttccggaaatggcgtcagaatttattgattcaccaacggcaactttctctggataaaggattccggataccatgttctgcacatactgagtgagtcgatgagcggaatgttgtccgatatattttgcatgtagccgtatattccgtttcactctgctgtcaccgcatcccgtatagagcagcctgaaatcgctcagtgttcccagtccaagtttcattaaagcccgtgtggcaatcgcatgcagggtctttgaactgcgttgttcataacgggcaatctcactgaaactcataccctgcatcagaatcttaagcacgctcaactcccgtgcagtcaggagccagaaatcgctcatatcgccgggcaaaggacgcagtaaccagcggataatttgattctgataacgactcgctgtcagcatggtgccgatgcgtgggaagccgttatacagacttgcagcaggagcattatcgaaccagtcggagtcaccggtcaggcagacctgccattgcccggcatcactccgcaaacgggcgagacaagccagaagaaccaactcccctgaaggaagcgaagggatatcagctaacaggtagccacaggaggtctttaaaacgaattcaacctctgtagtgacgttgctgtacacccgcacgatatacctgtccgttgggatgagagactccagtgccaacctggtgaactgacaggcactgataataaccagaggcttcttcattcagactcgtccacgccattgctacaaaacctgacattttgattcaaaatgtcaggtttggtttaatagcctgaatatttaattttcttggaatataaatctaatttgtttggtttttattgtttttaattttgtgttatttaacaatatgggcgaaagttaatcactggtatgacctttgtgattaatcattttaaatcatggggttattttaatttagctagaaatatcaacatgttatgtgttttatttaattgaatgggctgtttttttatggaagaattgaggaaaacgtaggaatctgacattttgaatcagaaggtactgttttaacgaggcttttttttccacacccctttaaaacgagcagcattactggctgtgtatctgacagtatgctgaatatttcgatgacccagataatcctgaagtagtcgggtatcgacaccattgtcagccagagcaaaaccacaggcatgacgtaacatatgaggatgtgcttttacagctaatcctgcacgttttccagcctcacgaatgatagaaaaaaaatgttgtctgctgatagggcggcgtttccgggagagaaaaagccagtctccttcaactccgttttcaattaacttcctctgcttaagccacaacttgatcaaattatattcatcaggaagaagaggatgtgttgtcgagaaaccatttttaatacgccgaatattaagttgttttccagatgcatcaatatcggataaacgtaaatcaagaagttcactggccctaaaaccgtgaatgaaagccatcataatcagacagcgatttctttcaggaaaggacatgctctgggctgcatccatcagcctgtagacttcatcctgtgtgagatattttctcgtcatacgccaccgtgtacagttgtaaaaaaaagagaggcacacccagataagtatgcctgcaatcagaacgttatcgatgaatctcattatctcattaataagattttttgaatagtagttctacgcaacagattaaatatgaactatttattgtgcagcttttctacaagtcatttttaatgcgtgtttttatctactataatgtgaaaaaataaatattaaaactatgagtgacaggtcgtgtgggatgtgtattacgtctaacgttttagtaattttttattagttatgagatatttaacatcatttcctgtgagattgtcttgttgtgtatccaattgattttacttttgttttttttgatgcataaatttggaggatagaaagtaagattagcttaatatcaatgatatgaatttgtaaatacatattgttgcaaggtgttctttacttttttggtcgtgagtaaatcattgttaatgggttctactcataaattaaaaatattcatttaaatgatttttactttttgtatatctcaatttgtttattttgcattcatttgatggagagtattccaacactttttatttttcgcaaaaaacttattaacaactttttattatcaattgaaaattaatgtaaactaaaatgttagcgaagcgataatcttgtgctaaaaaatatttaagcatgatgattaattaaagaagagtaaaaataaatcactgctaataaattatacgaatcgtgtttaaagctccatgtggttttggtctgacttatttttgtactcgttacaagaacccttttcgtatatgctaaccgtgagcgggaatgaacaggtaaccatagccaggaacattagcggcgtaattcttaagctgagtggtatttcatctgtagtttatctgtgtatgcatagcaccttcatcagccagattgagcaagtcagcttagaatttgctggcgagattgtcacgatgaag

SEQ ID NO: 570 - DNA, 2295 bp, Escherichia coli
atgaaaaacagtaaggtattttaccgcagcgcattagcgacagctattgttatggctctttctgcaccagcattcgctactgatagcacggtatcaactgatccggttacgctgaatacagagaagacgactctggatcaagatgttgttattaacggtgataacaagattacagccgtaacaattgaaacgtcagattcagataaagaccttaatgttacttttggcggtcacgatattaccgccgcatcaacggtaaaccaagatttcgttgaaggtgtaaaagttagtggtaacaaaaatgttgtgattaatgctacagactccaccatcacagctcaaggtgaaggcacctatgtccggactgcaatggtcattgattcaactggcgatgttgttgttaatggcggtaatttcgttgcaaaaaatgaaaaaggtagtgcgacagggatatctctggaagcgaccacgggaaataatttaacgctcaatggtacaaccataaatgctcaaggtaataagagttacagcaacggctctacggcaatttttgctcaaaagggtaatttgttgcagggttttgacggtgatgcaaccgacaacatcacccttgctgactcaaatattattaatggcgggattgaaacaatagttactgccgggaataagacgggaattcatacagtcaacctgaatattaaggatggctcagtaattggggcggctaataataaacaaacaatttatgcctctgcttcggcacaaggcgcaggttcagcaacgcaaaatttaaatttgtctgttgctgattcaaccatctactctgatgtcctggccctttctgaaagcgagaattcagccagtaccacaacaaatgtaaatatgaacgttgcccgctcttactgggaaggtaatgcttataccttcaatagcggcgataaagcgggtagtgatctggatataaatctttccgatagttcagtctggaaaggcaaagtttcaggggcaggagatgccagtgtatctctgcaaaacgggtctgtctggaatgttacgggttcctcaactgttgatgctctggcagtaaaagacagtacggttaatatcacgaaggctacagtcaatactggcacgtttgcttctcaaaacggcactctgattgttgatgcctcttctgaaaacactctggatatcagcggtaaagcgagcggtgacttgcgtgtttacagtgcgggttcattggatcttatcaatgaacaaacggcatttatttctaccggcaaagacagcactctaaaagccacaggcacaacggaaggtggtctgtatcaatatgacctgacacagggagctgatggtaacttttatttcgtaaaaaacacgcataaagcatccaacgccagctccgtgattcaggcaatggcagctgctccggctaacgtcgctaatctgcaggctgacacgctctccgcccgtcaggatgctgtccgtctgagcgaaaatgacaagggtggcgtatggattcagtactttggcggtaaacagaaacataccaccgcgggaaatgcatcctatgacctggatgtaaatggtgtaatgctgggtggtgatacccgcttcatgactgaagatggtagctggctggccggtgtggcgatgtcttctgcgaaaggtgacatgactaccatgcagagcaaaggtgacactgaaggttacagcttccacgcttacctgagccgccagtataacaacggtatcttcattgatactgctgcacagtttggtcactacagcaacacggcagatgttcgcctgatgaatggtggcggtaccatcaaagctgactttaacaccaatggttttggtgcgatggttaaaggcggttacacatggaaagacggtaatggcctgtttattcagccatatgccaaactgtctgctctgactctggaaggtgtggattatcaactcaacggcgtggacgttcattctgacagctataactctgtgctgggtgaggccggtacgcgcgtgggttatgacttcgctgtgggcaacgcgaccgttaaaccttatctgaatctggccgcactgaacgaattctctgatggcaacaaagtccgtctgggtgatgagtctgtcaatgccagcattgacggtgcagcattccgcgtgggtgcaggtgtacaagctgatatcaccaaaaacatgggagcatatgcaagccttgactacaccaaaggtgacgacattgagaacccgctacagggtgtagttggtatcaatgtgacctgg

SEQ ID NO: 571 - protein, 776 aa, Escherichia coli
LKLVTRMENFFMKNSKVFYRSALATAIVMALSAPAFATDSTVSTDPVTLNTEKTTLDQDVVINGDNKITAVTIETSDSDKDLNVTFGGHDITAASTVNQDFVEGVKVSGNKNVVINATDSTITAQGEGTYVRTAMVIDSTGDVVVNGGNFVAKNEKGSATGISLEATTGNNLTLNGTTINAQGNKSYSNGSTAIFAQKGNLLQGFDGDATDNITLADSNIINGGIETIVTAGNKTGIHTVNLNIKDGSVIGAANNKQTIYASASAQGAGSATQNLNLSVADSTIYSDVLALSESENSASTTTNVNMNVARSYWEGNAYTFNSGDKAGSDLDINLSDSSVWKGKVSGAGDASVSLQNGSVWNVTGSSTVDALAVKDSTVNITKATVNTGTFASQNGTLIVDASSENTLDISGKASGDLRVYSAGSLDLINEQTAFISTGKDSTLKATGTTEGGLYQYDLTQGADGNFYFVKNTHKASNASSVIQAMAAAPANVANLQADTLSARQDAVRLSENDKGGVWIQYFGGKQKHTTAGNASYDLDVNGVMLGGDTRFMTEDGSWLAGVAMSSAKGDMTTMQSKGDTEGYSFHAYLSRQYNNGIFIDTAAQFGHYSNTADVRLMNGGGTIKADFNTNGFGAMVKGGYTWKDGNGLFIQPYAKLSALTLEGVDYQLNGVDVHSDSYNSVLGEAGTRVGYDFAVGNATVKPYLNLAALNEFSDGNKVRLGDESVNASIDGAAFRVGAGVQADITKNMGAYASLDYTKGDDIENPLQGVVGINVTW

SEQ ID NO: 572 - DNA, 825 bp, Escherichia coli
ctgcaggattgggaggcacgctgtacagcctgtacagcgtgctggcgtactgacatctgtgagggaaggatgcgtttcgttcttttctgtccctcagggaattgtaccagcgcagttcgcagctctatcaaccggttctgtcggcaatgttacctgcatcagaacagaaggaggagttacgcaataaattgcgggcacaggccacagagtgtcgtgatatcggcagggcgacctgccgaatgcgctgaaatgtggttccgattttatcgggatcactcattcgtggtggtgttgtgcgtcgcgcccttttttctgccaccggatgtttctggcgttctcaaaaacctgaggttactgaaaccaggaatgtcagtagagcgtgtcatcagtattgcaaatgcctctggtgggttttcagggctgaagcatgcagaaattttgccagttatggacagttactctgtctttatgaaagaggtgaataactgcacaaagacaatcgtcatgtcagaacgcttcccggaaaagcaaaagaaggtgttgtcgttacttcttgccggacacagctgggaatacagtgcgcagtttctcaaaacggggataagacagatatggcttgccgagcagtcgctaaaaaagcgttggggaataccggacagcatgtcattgcgggaagccctgctgctgagcagcaataattttcacggtgatggaaatgcattggaaacaacgaatgccatgacattgcgtgaaaacggaaataccaacaggtattccgtggtggtaaatgcagggacgcaggctttatctctgcataaatataaa

SEQ ID NO: 573 - protein, 275 aa, Escherichia coli
LQDWEARCTACTACWRTDICEGRMRFVLFCPSGNCTSAVRSSINRFCRQCYLHQNRRRSYAINCGHRPQSVVISAGRPAECAEMWFRFYRDHSFVVVLCVAPFFLPPDVSGVLKNLRLLKPGMSVERVISIANASGGFSGLKHAEILPVMDSYSVFMKEVNNCTKTIVMSERFPEKQKKVLSLLLAGHSWEYSAQFLKTGIRQIWLAEQSLKKRWGIPDSMSLREALLLSSNNFHGDGNALETTNAMTLRENGNTNRYSVVVNAGTQALSLHKYK

SEQ ID NO: 574 - DNA, 792 bp, Escherichia coli
atgaagaagcctctggttattatcagtgcctgtcagttcaccaggttggcactggagtctctcatcccaacggacaggtatatcgtgcgggtgtacagcaacgtcactacagaggttgaattcgttttaaagacctcctgtggctacctgttagctgatatcccttcgcttccttcaggggagttggttcttctggcttgtctcgcccgtttgcggagtgatgccgggcaatggcaggtctgcctgaccggtgactccgactggttcgataatgctcctgctgcaagtctgtataacggcttcccacgcatcggcaccatgctgacagcgagtcgttatcagaatcaaattatccgctggttactgcgtcctttgcccggcgatatgagcgatttctggctcctgactgcacgggagttgagcgtgcttaagattctgatgcagggtatgagtttcagtgagattgcccgttatgaacaacgcagttcaaagaccctgcatgcgattgccacacgggctttaatgaaacttggactgggaacactgagcgatttcaggctgctctatacgggatgcggtgacagcagagtgaaacggaatatacggctacatgcaaaatatatcggacaacattccgctcatcgactcactcagtatgtgcagaacatggtatccggaatcctttatccagagaaagttgccgttggtgaatcaataaattctgacgccatttccggaaaagtactttccggacaaagaaaaaatatatctaaaaaaagaccaggattgtta

SEQ ID NO: 575 - protein, 264 aa, Escherichia coli
MKKPLVIISACQFTRLALESLIPTDRYIVRVYSNVTTEVEFVLKTSCGYLLADIPSLPSGELVLLACLARLRSDAGQWQVCLTGDSDWFDNAPAASLYNGFPRIGTMLTASRYQNQIIRWLLRPLPGDMSDFWLLTARELSVLKILMQGMSFSEIARYEQRSSKTLHAIATRALMKLGLGTLSDFRLLYTGCGDSRVKRNIRLHAKYIGQHSAHRLTQYVQNMVSGILYPEKVAVGESINSDAISGKVLSGQRKNISKKRPGLL

SEQ ID NO: 576 - DNA, 645 bp, Escherichia coli
atgagattcatcgataacgttctgattgcaggcatacttatctgggtgtgcctctcttttttttacaactgtacacggtggcgtatgacgagaaaatatctcacacaggatgaagtctacaggctgatggatgcagcccagagcatgtcctttcctgaaagaaatcgctgtctgattatgatggctttcattcacggttttagggccagtgaacttcttgatttacgtttatccgatattgatgcatctggaaaacaacttaatattcggcgtattaaaaatggtttctcgacaacacatcctcttcttcctgatgaatataatttgatcaagttgtggcttaagcagaggaagttaattgaaaacggagttgaaggagactggctttttctctcccggaaacgccgccctatcagcagacaacattttttttctatcattcgtgaggctggaaaacgtgcaggattagctgtaaaagcacatcctcatatgttacgtcatgcctgtggttttgctctggctgacaatggtgtcgatacccgactacttcaggattatctgggtcatcgaaatattcagcatactgtcagatacacagccagtaatgctgctcgttttaaaggggtgtggaaaaaaaagcctcgt

SEQ ID NO: 577 - protein, 215 aa, Escherichia coli
MRFIDNVLIAGILIWVCLSFFYNCTRWRMTRKYLTQDEVYRLMDAAQSMSFPERNRCLIMMAFIHGFRASELLDLRLSDIDASGKQLNIRRIKNGFSTTHPLLPDEYNLIKLWLKQRKLIENGVEGDWLFLSRKRRPISRQHFFSIIREAGKRAGLAVKAHPHMLRHACGFALADNGVDTRLLQDYLGHRNIQHTVRYTASNAARFKGVWKKKPR

SEQ ID NO: 578 - DNA, 2498 bp, Escherichia coli
tgtaactctctttgaatcataaactgaaggatgatgcagcacagttcctcgtggactatcctggctactacatgaccaaacgcggatatcatcctcgagcagtcaactctggccatctttttactcagctatgaggacctgatcgtcgactttgctatctgcatgatgaatctcctcagcagcagatgcagtatttaccgaaatgaattccatgaataatgcagtaattagtagtgctttcatatctgatacctgttttaaacgatatatttgaaagttgacgaatatcggaaatagcttcctccttcttgatctgtaaatatacagttctaagctgtcataagactgactgtcatatgacaacgttgttagatttttgaatttttcgaatacagattcaggtcgttaataacgcactcaggttcttcagtaaggggcatattgtctatatcgaaaaccccatcatttttttgtggattatcattccgcagctctgcaaacagaggagtgagatcctgctgtgcttctcctcgctctgcgaccagttcgaacgttttattttttgccgcatcgttgctcagagctgttacaagaacctgggcgatttgctcccgggagataacaccatcttccggcgttcccgcatggcgtctgtccccctgaagcatgacgattctgtgctcatcatcattgttgtaatcaaaccagccgggtctgacgatagtgtagatatgcccactggctctgaccaggcgttcagagcgtctcttccagtcatgaacttcagtacgttgattccagctactgagccgctcagttacgccaatcgttgtcatcagggcgatgcgaacaggtgtatccatgaatattcgcaaaatgttacgtacaccgccgtaatctattgctctggcgccaatacgtccctgaccatcagagccgagtgtaaaaatgatggcatcaatatctttcggtaaatcggtaagtgtttcaggtattgaaacatcgccatagaaaatatctgttccacgagggagtaacttgattttccgccgattcctgaccagagtcacgggctgatggcccattgcaatagcagtattcacaacatgaataccaatacttcctgttgcgccagcaacgagtattctcatgataaaccttctgataattcagccttatttttgatacagccagaatatcaattatcattattgccagtaacgaggctaaaatgattgtgtctatgaacacccttcatgaatgcgctttgaagggaatgcttctacaaggaaatcatcaatgcttaaagaaaacttcaacgaactgcaaatctttcttgtggtggcaagagagcgaagttttaccaaagcagcgagcaaactcggcgtctctcagtctgcacttagccatgcaatgaaggcactggaggaaaggttaaatatccgtctcttaacccgaactacccgtagcgtggcccccacggaagcaggggagagaattattgcctgtcttgagccacgtatagatgagcttgagcgcgagctggaatcacttatccaactgaatggcgcgccatccgggaatattcgtttatcagccggggaacatgctgcacgcagtctggtctggccgaagttaaaatcgttcctcagagaatatcccgaaatcaatgtcgaactggtggtggataacggttttgtcgatattgttgacggtcgttttgatgccgggatccggctgggtgaaagtgtggataaggatatgattgcagtgcgaattgggccggatatgcggatggccatggtgggatcgccggcgtattttgctgcaaaccctgcgcctgaaacgcctcacgaactacaaaatcatcgctgcatcaataacgtaacgtggataaacctgcgaatcgtattgaagatatccacggtatggctgatttcatcaagccagtatcctggtgttgatagcacccgtattggtttgttggggatttgcgggggaggagggtattcacttgctaccgccgagacggacaaacgattcaaatcgattgcaaccattagcatgtttaattcaggacttgtacggcgcaatggtatgcaggattcacagttggatactattcaacaacgtcttaagcaggcttcagatgcacgagctcaggaagtcgccggtagcgaagtgctttactccggtgatgccaacctgactgatgaacagatcggctaaattaccttttgctgttatatcgccagggctacgagtactactggaaaacccacgcacacccaaacatattcagaagcgtgagggatatagtgccatcaaagcgctggctgctgtaaacaacgcaattatccaactcatggtctatggtgtgccatcactgaacagaggttgaatttttctaccgaaacgggagggaagtcagaaatcacaacgtattgatttatctgtgtgtggatgtgaatggtgaagtaaagaccttcacaggcaat

SEQ ID NO: 579 - DNA, 966 bp, Escherichia coli
atgcgctttgaagggaatgcttctacaaggaaatcatcaatgcttaaagaaaacttcaacgaactgcaaatctttcttgtggtggcaagagagcgaagttttaccaaagcagcgagcaaactcggcgtctctcagtctgcacttagccatgcaatgaaggcactggaggaaaggttaaatatccgtctcttaacccgaactacccgtagcgtggcccccacggaagcaggggagagaattattgcctgtcttgagccacgtatagatgagcttgagcgcgagctggaatcacttatccaactgaatggcgcgccatccgggaatattcgtttatcagccggggaacatgctgcacgcagtctggtctggccgaagttaaaatcgttcctcagagaatatcccgaaatcaatgtcgaactggtggtggataacggttttgtcgatattgttgacggtcgttttgatgccgggatccggctgggtgaaagtgtggataaggatatgattgcagtgcgaattgggccggatatgcggatggccatggtgggatcgccggcgtattttgctgcaaaccctgcgcctgaaacgcctcacgaactacaaaatcatcgctgcatcaataacgtaacgtggataaacctgcgaatcgtattgaagatatccacggtatggctgatttcatcaagccagtatcctggtgttgatagcacccgtattggtttgttggggatttgcgggggaggagggtattcacttgctaccgccgagacggacaaacgattcaaatcgattgcaaccattagcatgtttaattcaggacttgtacggcgcaatggtatgcaggattcacagttggatactattcaacaacgtcttaagcaggcttcagatgcacgagctcaggaagtcgccggtagcgaagtgctttactccggtgatgccaacctgactgatgaacagatcggc

SEQ ID NO: 580 - protein, 309 aa, Escherichia coli
MLKENFNELQIFLVVARERSFTKAASKLGVSQSALSHAMKALEERLNIRLLTRTTRSVAPTEAGERIIACLEPRIDELERELESLIQLNGAPSGNIRLSAGEHAARSLVWPKLKSFLREYPEINVELVVDNGFVDIVDGRFDAGIRLGESVDKDMIAVRIGPDMRMAMVGSPAYFAANPAPETPHELQNHRCINNVTWINLRIVLKISTVWLISSSQYPGVDSTRIGLLGICGGGGYSLATAETDKRFKSIATISMFNSGLVRRNGMQDSQLDTIQQRLKQASDARAQEVAGSEVLYSGDANLTDEQIG

SEQ ID NO: 581 - DNA, 780 bp, Escherichia coli
atgagaatactcgttgctggcgcaacaggaagtattggtattcatgttgtgaatactgctattgcaatgggccatcagcccgtgactctggtcaggaatcggcggaaaatcaagttactccctcgtggaacagatattttctatggcgatgtttcaatacctgaaacacttaccgatttaccgaaagatattgatgccatcatttttacactcggctctgatggtcagggacgtattggcgccagagcaatagattacggcggtgtacgtaacattttgcgaatattcatggatacacctgttcgcatcgccctgatgacaacgattggcgtaactgagcggctcagtagctggaatcaacgtactgaagttcatgactggaagagacgctctgaacgcctggtcagagccagtgggcatatctacactatcgtcagacccggctggtttgattacaacaatgatgatgagcacagaatcgtcatgcttcagggggacagacgccatgcgggaacgccggaagatggtgttatctcccgggagcaaatcgcccaggttcttgtaacagctctgagcaacgatgcggcaaaaaataaaacgttcgaactggtcgcagagcgaggagaagcacagcaggatctcactcctctgtttgcagagctgcggaatgataatccacaaaaaaatgatggggttttcgatatagacaatatgccccttactgaagaacctgagtgcgttattaacgacctgaatctgtattcgaaaaattcaaaaatc

SEQ ID NO: 582 - protein, 260 aa, Escherichia coli
MRILVAGATGSIGIHVVNTAIAMGHQPVTLVRNRRKIKLLPRGTDIFYGDVSIPETLTDLPKDIDAIIFTLGSDGQGRIGARAIDYGGVRNILRIFMDTPVRIALMTTIGVTERLSSWNQRTEVHDWKRRSERLVRASGHIYTIVRPGWFDYNNDDEHRIVMLQGDRRHAGTPEDGVISREQIAQVLVTALSNDAAKNKTFELVAERGEAQQDLTPLFAELRNDNPQKNDGVFDIDNMPLTEEPECVINDLNLYSKNSKI

SEQ ID NO: 583 - DNA, 3708 bp, Escherichia coli
agtaatacagcttaatattgccccgataagcggggcaatctcttataatccaccattcataactcccatcaatatataaacacatacatatccaacctttatttaacattaatactcaatttaatgttaaatcgtcatatgcaagcgatattgtaattaaagtaagtgaatacatcacaacataactatttgatattatttaaatactttacttttatctcaccagatttaaatttaataattaaaaaacaatgttgcagggatcacactacacagtattgaacattgtgattgatatattgcccccctactatccattaaacataaatatttgtttcaccgaataacaacatatttaaaagaaacacaaaaacattctcactctttattgaattaatatttatattcacgtaacgaatttattagcaccctctcaacagtcgatattcatcattattatatatttgcgttatataaggagatatatccatgtttgataaatatagaaaaacactcgtagccggaactgtggcgataaccctgggtttgtcagcatcgggggtgatggctgcgggttttaaaccagcgccacctgccgggcaactgggtgcggtcattgtcgatccctacggcaatgcaccactgaccgctttggttgacttagatagccatgttatttctgacgtcaaagttaccgtccatgggaagggcgaaaaaggcgtagaaatcagctatcccgtgggtcaggaatcactaaaaacttacgatggtgtaccgatttttggtctttatcagaaatttgctaacaaagtgaccgttgagtggaaagaaaacggcaaggtcatgaaagatgattatgtggtgcacacttcggccatcgtcaataattacatggataaccgctctatctccgatttacaacagaccaaagttattaaagtcgcaccgggttttgaagatcgcctctatctggttaatacccacacctttaccgccggtcgatctccactggcatggtgagaaagataaaaatgccggtatccttgatgcgggtccggcaaccggcgcactcccttttgatatcgcgccctttactttcatcgtcgataccgaaggtgaataccgctggtggctggatcaagacactttctacgatggtcgtgaccgcgatatcaacaagcgtggttatctgatgggtatccgcgaaacgccacgcggcacctttaccgctgtacaaggtcagcactggtacgagttcgacatgatggggcaggtgctcgaagatcacaaactaccgcgcggatttgctgacgccactcatgagtccattgagacgccaaatggcacggtactgttgcgcgtaggtaagagtaactatcgtcgcgatgacggcgtacacgtcaccaccattcgtgaccatatcctcgaagtcgataaatctggtcgcgttgtcgatgtatgggatctgaccaagatcctcgatccgaaacgcgatgcactgctcggcgcgctggatgcaggtgcagtttgcgttaacgttgaccttgcccatgcaggacaacaggcaaaactggaaccagatacaccgttcggcgacgcgctgggtgtagggccaggccgcaactgggcgcacgtgaactctatcgcctatgacgcaaaagatgactctatcatcctctcctctcgccaccagggtgttgtgaagattggtcgtgataagcaagtgaaatggatccttgcgccctctaaaggttgggaaaaaccgctggccagcaagctgctgaaaccggtggacgctaacggtaaacctattacctgtaacgaaaatggcctgtgcgaaaactcagacttcgattttacctacacccagcataccgcctggatttccagtaaaggaacgctcaccatttttgataatggcgatgggcgtcatctggaacaacctgccttaccaaccatgaaatactcccgctttgtggaatataagattgatgagaagaaaggcaccgttcagcaagtgtgggaatacggtaaagaacgtggctacgatttctatagcccgattacctccatcattgaatatcaagccgaccgtaacaccatgtttggcttcggtggttctattcatttgttcgatgtcgggcagccaaccgtcggtaagttgaacgaaatcgattacaaaaccaaagaagtgaaagtggaaatcgacgtgctgtcagataaacccaatcagactcactaccgtgcgctgttagtccgtccacaacagatgttcaaataattaagaagggaataaaaatgtcgaaattagggatctcatcactatttaaaaccatactgcttaccgcagctttggctgtttcatttaccgcttctgcatttaccgaaggcacggattacatggttctggaaaaacctattccgaatgccgacaaaacgctgattaaggtatttagctacgcctgcccgttctgttacaagtacgacaaagcggttaccggtccggtatcggaaaaagtgaaagatatcgttgctttcacgccgttccatctggaaacaaaaggtgaatacggcaaacaagcaagcgaagtctttgcggtcttgatcaataaagataaagcagcaggcatttccttatttgatgctaactctcagtttaagaaagccaagtttgcctactacgcggcttatcacgacaaaaaagaacgctggtctgacggtaaagatccggctgcttttatcaaaaccggtctggatgccgcaggtatgagtcaggcggattttgaagcggcactgaaagaaccagcagttcaagaaacactggaaaaatggaaagcctcttatgatgtcgccaaaatccagggggttccagcctatgtcgttaatggtaagtacttgatctacaccaagagcatcaaatccatcgacgcgatggcagaccttatccgtgagttagcaagcaaataacagggaaacaggctatgggtattaagggaatgtggaaagatcttcgcacatcaccagttgacacactggtcagatggcaggagcaacgcttgttgtggttgttaatggccgttgcgatgggcgcgttaattatcctggcgcactctttcttccagatctatctctacatggcaccctgtgagcaatgtgtatacattcgctacgccatgtttgtgatggttattggaggattggttgcagcgatcaacccaaagaacatcatcctaaagctaattggctgcgtgatggcattttacggcagcattttgggactgaagttttcgctcaaactgaacgatatccaccatgcagtacataatccggatcccgattcactgtttggcgtacagggttgctctaccgatccaacttttccctttaacctgccgctggcacagtgggcaccaaattggttcaagcctaccggggattgtggctatgacgcaccaatcgttcctgatggcgtcacactgagcagcacgcaacagtggtttgtggaaatgtatcagcaatctgaaggctggtatctgctaccaccatggcattttatgaatatggctcaggcttgtatgctggcttttggtatgtgtctggtgctgctggtcattatgagtggcgcatgggcgcttaaaatcatcagaggctaactcagcaacacccgaagccagtcattctggcttcgggttcttttattaacctatc

SEQ ID NO: 584 - DNA, 1794 bp, Escherichia coli
atgtttgataaatatagaaaaacactcgtagccggaactgtggcgataaccctgggtttgtcagcatcgggggtgatggctgcgggttttaaaccagcgccacctgccgggcaactgggtgcggtcattgtcgatccctacggcaatgcaccactgaccgctttggttgacttagatagccatgttatttctgacgtcaaagttaccgtccatgggaagggcgaaaaaggcgtagaaatcagctatcccgtgggtcaggaatcactaaaaacttacgatggtgtaccgatttttggtctttatcagaaatttgctaacaaagtgaccgttgagtggaaagaaaacggcaaggtcatgaaagatgattatgtggtgcacacttcggccatcgtcaataattacatggataaccgctctatctccgatttacaacagaccaaagttattaaagtcgcaccgggttttgaagatcgcctctatctggttaatacccacacctttaccgccggtcgatctgatctccactggcatggtgagaaagataaaaatgccggtatccttgatgcgggtccggcaaccggcgcactcccttttgatatcgcgccctttactttcatcgtcgataccgaaggtgaataccgctggtggctggatcaagacactttctacgatggtcgtgaccgcgatatcaacaagcgtggttatctgatgggtatccgcgaaacgccacgcggcacctttaccgctgtacaaggtcagcactggtacgagttcgacatgatggggcaggtgctcgaagatcacaaactaccgcgcggatttgctgacgccactcatgagtccattgagacgccaaatggcacggtactgttgcgcgtaggtaagagtaactatcgtcgcgatgacggcgtacacgtcaccaccattcgtgaccatatcctcgaagtcgataaatctggtcgcgttgtcgatgtatgggatctgaccaagatcctcgatccgaaacgcgatgcactgctcggcgcgctggatgcaggtgcagtttgcgttaacgttgaccttgcccatgcaggacaacaggcaaaactggaaccagatacaccgttcggcgacgcgctgggtgtagggccaggccgcaactgggcgcacgtgaactctatcgcctatgacgcaaaagatgactctatcatcctctcctctcgccaccagggtgttgtgaagattggtcgtgataagcaagtgaaatggatccttgcgccctctaaaggttgggaaaaaccgctggccagcaagctgctgaaaccggtggacgctaacggtaaacctattacctgtaacgaaaatggcctgtgcgaaaactcagacttcgattttacctacacccagcataccgcctggatttccagtaaaggaacgctcaccatttttgataatggcgatgggcgtcatctggaacaacctgccttaccaaccatgaaatactcccgctttgtggaatataagattgatgagaagaaaggcaccgttcagcaagtgtgggaatacggtaaagaacgtggctacgatttctatagcccgattacctccatcattgaatatcaagccgaccgtaacaccatgtttggcttcggtggttctattcatttgttcgatgtcgggcagccaaccgtcggtaagttgaacgaaatcgattacaaaaccaaagaagtgaaagtggaaatcgacgtgctgtcagataaacccaatcagactcactaccgtgcgctgttagtccgtccacaacagatgttcaaa

SEQ ID NO: 585 - protein, 598 aa, Escherichia coli
MFDKYRKTLVAGTVAITLGLSASGVMAAGFKPAPPAGQLGAVIVDPYGNAPLTALVDLDSHVISDVKVTVHGKGEKGVEISYPVGQESLKTYDGVPIFGLYQKFANKVTVEWKENGKVMKDDYVVHTSAIVNNYMDNRSISDLQQTKVIKVAPGFEDRLYLVNTHTFTAGRSDLHWHGEKDKNAGILDAGPATGALPFDIAPFTFIVDTEGEYRWWLDQDTFYDGRDRDINKRGYLMGIRETPRGTFTAVQGQHWYEFDMMGQVLEDHKLPRGFADATHESIETPNGTVLLRVGKSNYRRDDGVHVTTIRDHILEVDKSGRVVDVWDLTKILDPKRDALLGALDAGAVCVNVDLAHAGQQAKLEPDTPFGDALGVGPGRNWAHVNSIAYDAKDDSIILSSRHQGVVKIGRDKQVKWILAPSKGWEKPLASKLLKPVDANGKPITCNENGLCENSDFDFTYTQHTAWISSKGTLTIFDNGDGRHLEQPALPTMKYSRFVEYKIDEKKGTVQQVWEYGKERGYDFYSPITSIIEYQADRNTMFGFGGSIHLFDVGQPTVGKLNEIDYKTKEVKVEIDVLSDKPNQTHYRALLVRPQQMFK

SEQ ID NO: 586 - DNA, 666 bp, Escherichia coli
atgtcgaaattagggatctcatcactatttaaaaccatactgcttaccgcagctttggctgtttcatttaccgcttctgcatttaccgaaggcacggattacatggttctggaaaaacctattccgaatgccgacaaaacgctgattaaggtatttagctacgcctgcccgttctgttacaagtacgacaaagcggttaccggtccggtatcggaaaaagtgaaagatatcgttgctttcacgccgttccatctggaaacaaaaggtgaatacggcaaacaagcaagcgaagtctttgcggtcttgatcaataaagataaagcagcaggcatttccttatttgatgctaactctcagtttaagaaagccaagtttgcctactacgcggcttatcacgacaaaaaagaacgctggtctgacggtaaagatccggctgcttttatcaaaaccggtctggatgccgcaggtatgagtcaggcggattttgaagcggcactgaaagaaccagcagttcaagaaacactggaaaaatggaaagcctcttatgatgtcgccaaaatccagggggttccagcctatgtcgttaatggtaagtacttgatctacaccaagagcatcaaatccatcgacgcgatggcagaccttatccgtgagttagcaagcaaa

SEQ ID NO: 587 - protein, 222 aa, Escherichia coli
MSKLGISSLFKTILLTAALAVSFTASAFTEGTDYMVLEKPIPNADKTLIKVFSYACPFCYKYDKAVTGPVSEKVKDIVAFTPFHLETKGEYGKQASEVFAVLINKDKAAGISLFDANSQFKKAKFAYYAAYHDKKERWSDGKDPAAFIKTGLDAAGMSQADFEAALKEPAVQETLEKWKASYDVAKIQGVPAYVVNGKYLIYTKSIKSIDAMADLIRELASK

SEQ ID NO: 588 - DNA, 669 bp, Escherichia coli
atgggtattaagggaatgtggaaagatcttcgcacatcaccagttgacacactggtcagatggcaggagcaacgcttgttgtggttgttaatggccgttgcgatgggcgcgttaattatcctggcgcactctttcttccagatctatctctacatggcaccctgtgagcaatgtgtatacattcgctacgccatgtttgtgatggttattggaggattggttgcagcgatcaacccaaagaacatcatcctaaagctaattggctgcgtgatggcattttacggcagcattttgggactgaagttttcgctcaaactgaacgatatccaccatgcagtacataatccggatcccgattcactgtttggcgtacagggttgctctaccgatccaacttttccctttaacctgccgctggcacagtgggcaccaaattggttcaagcctaccggggattgtggctatgacgcaccaatcgttcctgatggcgtcacactgagcagcacgcaacagtggtttgtggaaatgtatcagcaatctgaaggctggtatctgctaccaccatggcattttatgaatatggctcaggcttgtatgctggcttttggtatgtgtctggtgctgctggtcattatgagtggcgcatgggcgcttaaaatcatcagaggc

SEQ ID NO: 589 - protein, 223 aa, Escherichia coli
MGIKGMWKDLRTSPVDTLVRWQEQRLLWLLMAVAMGALIILAHSFFQIYLYMAPCEQCVYIRYAMFVMVIGGLVAAINPKNIILKLIGCVMAFYGSILGLKFSLKLNDIHHAVHNPDPDSLFGVQGCSTDPTFPFNLPLAQWAPNWFKPTGDCGYDAPIVPDGVTLSSTQQWFVEMYQQSEGWYLLPPWHFMNMAQACMLAFGMCLVLLVIMSGAWALKIIRG

SEQ ID NO: 590 - DNA, 4820 bp, Escherichia coli
ctgcctgtagatgtcaccattcatttgcaggattgtattttatctgacggcactaacacgtgttgataaagtcaaaatcacctttagttctgccagtgttgacgcctaccgactccaacctgcttaaaaacactctggaaggtaacatcggcaggcgcaactgatgtaggctgtcgtctggtgaaatcagacaacaccaacgtgactcttggcactccaatcactatcaacttcccgacgactaactcttaccaggagttgaactttaaagcccgtatggagtcttgggacgcaccgcgaccccgggtaacgtgcaggccaggctaattaccttactcgactacaagtaatcggtagtcaatacctacacaacgccaggcggtaaagccgatgaaatttcatcggcaactttgggctttttagaaatggatttttatgaacaataaaaacacgttttcccgggataagttatcccatgcaattaaaaatgccctgtctggcgttgtgtgttccctactcttcgttttgccagtccacgccgtagaattcaacgtcgatatgattgacgcagaagaccgtgagaatatcgacatctctcgttttgagaaaaaaggctatatcccccctggtagatacctcgttcgtgtgcaaataaataaaaatatgttgccacaaacgttaatactggaatgggtaaaagccgataatgaaagtggttcgttactctgcttaaccaaagaaaatttgactaatttcggtcttaatacggaatttattgaatcattgcaaaacatagctggcagcgaatgtctcgatttaagccaacgtcaggagttaacgacacgacttgataaagctacgatgatattatcgctaagtgttccccaggcatggttaaaataccaggcaacaaactggacgccaccagagttttgggataccggtatcaccgggtttatccttgattacaacgtgtacgccagccagtatgccccacatcacggagacagcacccaaaacgtcagctcctatggtacgttaggctttaacctcggcgcatggcgcttacgtagcgattaccaatataatcagaattttgctgatggacgctcggtaaaccgcgacagcgaatttgcgcgaacttatctgtttcgccctatcccctcctggtcgtcaaaattcactatgggccagtacgacctgagctccaatctttacgataccttccactttactggcgcatcgctggaaagtgatgaaagcatgctgccgccagatttacagggttatgcgccacaaattaccggcatcgcgcagaccaacgcgaaagtaactgtggcacaaaatggtcgtgtactttatcaaaccactgtcgcgccaggcccttttactatttctgatttggggcaatcgtttcaggggcagctggatgtcacagtggaagaagaagatggccgcaccagcaccttccaggttggctccgcatccattccctatttaacccgtaaagggcaagtgcgctataaaacgtcactgggaaaaccgacatccgtcgggcataacgatatcaataatccctttttctggacggcggaagcctcctggggctggctgaacaatgtgtcgttgtatggtggtggcatgttcaccgctgatgattatcaggctatcactaccggtattggctttaaccttaaccaattcggttcgctttcttttgatgtcactggagcagacgcgtctttacagcaacaaaatagcggcaatctgcgtggttacagctatcgcttcaactatgcaaagcatttcgaatcgacaggcagtcagattaccttcgcgggttatcgcttctcagataaagattacgtgtcgatgagtgagtacctcagctcgcgtaatggcgatgagtcaatcgataatgaaaaagagagttatgtcatttccttgaaccagtactttgaaacgctggaattaaactcttatctcaacgttacacgcaatacttattgggacagcgccagcaataccaactactccgtatctgtaagcaaaaactttgatattggcgatttcaaaggtatatctgcatcgctggcagtaagtcgaatccgctgggatgacgacgaagagaatcaatattacttctctttctctctacctttacaacaaaaccgcaacatctcctacagtatgcagcgaacgggaagcagtaatacttcgcagatgatttcctggtacgattcatcagatcgcaacaatatctggaatatttcagcgtcggcaacggacgacaatatacgtgatggcgaaccaacactgcgcggcagctaccagcactattcgccgtggggacgcctgaacattaatggcagtgtacagccgaatcagtacaattctgttaccgcaggctggtacggttcacttaccgctacacgtcatggtgtcgcccttcacgattatagctatggcgataacgcccgcatgatggtcgataccgatggcatctccggcattgaaatcaactctaaccgtaccgttaccaacgggctgggcatcgccgtgataccttcgttatcgaactacaccacctccatgttgcgggtgaacaataacgatctgccagaaggtgtcgatgtcgaaaactcggttattcgtactacgctcacccagggtgccatcggctacgcaaaactgaatgccaccaccggataccaaatcgtcggcgttattcgtcaggaaaatggccgcttccctccactaggtgtgaatgtcacggataaagcgacaggtaaagatgtgggcctggtagcggaagatggcttcgtttatctcagcggtattcaggaaaacagtattctgcatttaacctggggtgataatacctgtgaagtcacgccgccaaaccaaagtaacattagtgaaagcgcgataattttaccttgtaaaacagtcaaataattcaggatgaatataatgaaattaccattaatcacaacaggaatgatttgttttctggggatctgcaactttgcccaggcgactgtctcccccgacaggacacgcatcatttttaatgcttcgaataaaagcgcaacggttcgcctgaccaaccaaagtaaaatcgatccttatcttgctcaatcgtggattgaagatgccagcggtaaaaaaacgcgtgattatatttcaacactgccgccgatggaacgtattgagcctgatgaacaggtacaaattcgcctgatggcgctggcctcgttaaataacttaccacaggaccgagaaacgctattctactataacgtgcgggaaattccgccgcgtgccaaagaacagaatgtcatgcaaatcgccatgcaaagccgtctgaaactgttctggcgaccgaaagcgattgagttaaaagaaggagagatggttcctctgcaaaaagtgacgattacccgcaccgccgccgggctgaccctgaataacccgacgccttatcatattaccgtcggctatatcggcactaatggcaagacactgatgcctggtgcggacagtattatggtggcaccatttgcttctgcgactcaacacttaaacaacctgccctctacgttccagttaggctttgtggcggactacggcgggctggagatgtttaaagtagtatgtaattccgtccagtccctctgccaaagtactcctgcgaagaaggggaaaatatgattacactttttcgactactggcgattctttgccttttttttaacgtttcagcttttgctgttgattgctatcaggatgggtacagaggaacaaccctcataaatggagatttaccaacgttcaaaattccagagaatgcgcaacctgggcaaaaaatttgggagagcggagatattaatatcacagtttattgtgacaatgcaccaggatggtcaagtaataacccatcagaaaatgtctatgcctggatcaaattgccccaaataaatagtgccgatatgttgaataatccgtatttaacatttggcgtgacttataatggtgtagattatgaagggacaaatgaaaaaattgatactcatgcgtgcctggataaatatgaacaatactataatgggtattatcatgaccctgtatgcaatggcagcactcttcaaaaaaatgtaacatttaacgcccattttcgcgtctatgtaaaattcaaaagccgcccggcaggagatcagacggtaaactttggcacagtcaacgtgctgcaattcgacggtgaaggcggggcgaacatggcccccaacgcgaaaaatttacgctatgcgattacggggttagataatatttcattccttgactgtagtgtcgacgtccgcatttccccggaaagtcagatagtcaattttgggcagatcgctgcgaattccattgcaactttcccaccgaaggcagcattcagcgtttctaccataaaagacattgcgtctgattgtaccgaacagtttgatgttgcaaccagtttctttacttcagatacattatatgacaatacgcatctggaaataggtaacggcttgctcatgcgaattactgatcaaaaaacgcaagaagatattaaatttaaccagttcaaattatttagtacttatattcccggtcagagtgcggcaatggcaacccgcgattaccaggccgaattaacccaaaaacctggtgaaccactcgtctatggcccatttcagaaagacctgatagttaaaatcaactaccactaaacagcaaaatgccgggaacaccccggcattttcatatttagtatttcatctcattagctg

SEQ ID NO: 591 - DNA, 2520 bp, Escherichia coli
atgaacaataaaaacacgttttcccgggataagttatcccatgcaattaaaaatgccctgtctggcgttgtgtgttccctactcttcgttttgccagtccacgccgtagaattcaacgtcgatatgattgacgcagaagaccgtgagaatatcgacatctctcgttttgagaaaaaaggctatatcccccctggtagatacctcgttcgtgtgcaaataaataaaaatatgttgccacaaacgttaatactggaatgggtaaaagccgataatgaaagtggttcgttactctgcttaaccaaagaaaatttgactaatttcggtcttaatacggaatttattgaatcattgcaaaacatagctggcagcgaatgtctcgatttaagccaacgtcaggagttaacgacacgacttgataaagctacgatgatattatcgctaagtgttccccaggcatggttaaaataccaggcaacaaactggacgccaccagagttttgggataccggtatcaccgggtttatccttgattacaacgtgtacgccagccagtatgccccacatcacggagacagcacccaaaacgtcagctcctatggtacgttaggctttaacctcggcgcatggcgcttacgtagcgattaccaatataatcagaattttgctgatggacgctcggtaaaccgcgacagcgaatttgcgcgaacttatctgtttcgccctatcccctcctggtcgtcaaaattcactatgggccagtacgacctgagctccaatctttacgataccttccactttactggcgcatcgctggaaagtgatgaaagcatgctgccgccagatttacagggttatgcgccacaaattaccggcatcgcgcagaccaacgcgaaagtaactgtggcacaaaatggtcgtgtactttatcaaaccactgtcgcgccaggcccttttactatttctgatttggggcaatcgtttcaggggcagctggatgtcacagtggaagaagaagatggccgcaccagcaccttccaggttggctccgcatccattccctatttaacccgtaaagggcaagtgcgctataaaacgtcactgggaaaaccgacatccgtcgggcataacgatatcaataatccctttttctggacggcggaagcctcctggggctggctgaacaatgtgtcgttgtatggtggtggcatgttcaccgctgatgattatcaggctatcactaccggtattggctttaaccttaaccaattcggttcgctttcttttgatgtcactggagcagacgcgtctttacagcaacaaaatagcggcaatctgcgtggttacagctatcgcttcaactatgcaaagcatttcgaatcgacaggcagtcagattaccttcgcgggttatcgcttctcagataaagattacgtgtcgatgagtgagtacctcagctcgcgtaatggcgatgagtcaatcgataatgaaaaagagagttatgtcatttccttgaaccagtactttgaaacgctggaattaaactcttatctcaacgttacacgcaatacttattgggacagcgccagcaataccaactactccgtatctgtaagcaaaaactttgatattggcgatttcaaaggtatatctgcatcgctggcagtaagtcgaatccgctgggatgacgacgaagagaatcaatattacttctctttctctctacctttacaacaaaaccgcaacatctcctacagtatgcagcgaacgggaagcagtaatacttcgcagatgatttcctggtacgattcatcagatcgcaacaatatctggaatatttcagcgtcggcaacggacgacaatatacgtgatggcgaaccaacactgcgcggcagctaccagcactattcgccgtggggacgcctgaacattaatggcagtgtacagccgaatcagtacaattctgttaccgcaggctggtacggttcacttaccgctacacgtcatggtgtcgcccttcacgattatagctatggcgataacgcccgcatgatggtcgataccgatggcatctccggcattgaaatcaactctaaccgtaccgttaccaacgggctgggcatcgccgtgataccttcgttatcgaactacaccacctccatgttgcgggtgaacaataacgatctgccagaaggtgtcgatgtcgaaaactcggttattcgtactacgctcacccagggtgccatcggctacgcaaaactgaatgccaccaccggataccaaatcgtcggcgttattcgtcaggaaaatggccgcttccctccactaggtgtgaatgtcacggataaagcgacaggtaaagatgtgggcctggtagcggaagatggcttcgtttatctcagcggtattcaggaaaacagtattctgcatttaacctggggtgataatacctgtgaagtcacgccgccaaaccaaagtaacattagtgaaagcgcgataattttaccttgtaaaacagtcaaa

SEQ ID NO: 592 - protein, 840 aa, Escherichia coli
MNNKNTFSRDKLSHAIKNALSGVVCSLLFVLPVHAVEFNVDMIDAEDRENIDISRFEKKGYIPPGRYLVRVQINKNMLPQTLILEWVKADNESGSLLCLTKENLTNFGLNTEFIESLQNIAGSECLDLSQRQELTTRLDKATMILSLSVPQAWLKYQATNWTPPEFWDTGITGFILDYNVYASQYAPHHGDSTQNVSSYGTLGFNLGAWRLRSDYQYNQNFADGRSVNRDSEFARTYLFRPIPSWSSKFTMGQYDLSSNLYDTFHFTGASLESDESMLPPDLQGYAPQITGIAQTNAKVTVAQNGRVLYQTTVAPGPFTISDLGQSFQGQLDVTVEEEDGRTSTFQVGSASIPYLTRKGQVRYKTSLGKPTSVGHNDINNPFFWTAEASWGWLNNVSLYGGGMFTADDYQAITTGIGFNLNQFGSLSFDVTGADASLQQQNSGNLRGYSYRFNYAKHFESTGSQITFAGYRFSDKDYVSMSEYLSSRNGDESIDNEKESYVISLNQYFETLELNSYLNVTRNTYWDSASNTNYSVSVSKNFDIGDFKGISASLAVSRIRWDDDEENQYYFSFSLPLQQNRNISYSMQRTGSSNTSQMISWYDSSDRNNIWNISASATDDNIRDGEPTLRGSYQHYSPWGRLNINGSVQPNQYNSVTAGWYGSLTATRHGVALHDYSYGDNARMMVDTDGISGIEINSNRTVTNGLGIAVIPSLSNYTTSMLRVNNNDLPEGVDVENSVIRTTLTQGAIGYAKLNATTGYQIVGVIRQENGRFPPLGVNVTDKATGKDVGLVAEDGFVYLSGIQENSILHLTWGDNTCEVTPPNQSNISESAIILPCKTVK

SEQ ID NO: 593 - DNA, 738 bp, Escherichia coli
atgaaattaccattaatcacaacaggaatgatttgttttctggggatctgcaactttgcccaggcgactgtctcccccgacaggacacgcatcatttttaatgcttcgaataaaagcgcaacggttcgcctgaccaaccaaagtaaaatcgatccttatcttgctcaatcgtggattgaagatgccagcggtaaaaaaacgcgtgattatatttcaacactgccgccgatggaacgtattgagcctgatgaacaggtacaaattcgcctgatggcgctggcctcgttaaataacttaccacaggaccgagaaacgctattctactataacgtgcgggaaattccgccgcgtgccaaagaacagaatgtcatgcaaatcgccatgcaaagccgtctgaaactgttctggcgaccgaaagcgattgagttaaaagaaggagagatggttcctctgcaaaaagtgacgattacccgcaccgccgccgggctgaccctgaataacccgacgccttatcatattaccgtcggctatatcggcactaatggcaagacactgatgcctggtgcggacagtattatggtggcaccatttgcttctgcgactcaacacttaaacaacctgccctctacgttccagttaggctttgtggcggactacggcgggctggagatgtttaaagtagtatgtaattccgtccagtccctctgccaaagtactcctgcgaagaaggggaaaata

SEQ ID NO: 594 - protein, 246 aa, Escherichia coli
MKLPLITTGMICFLGICNFAQATVSPDRTRIIFNASNKSATVRLTNQSKIDPYLAQSWIEDASGKKTRDYISTLPPMERIEPDEQVQIRLMALASLNNLPQDRETLFYYNVREIPPRAKEQNVMQIAMQSRLKLFWRPKAIELKEGEMVPLQKVTITRTAAGLTLNNPTPYHITVGYIGTNGKTLMPGADSIMVAPFASATQHLNNLPSTFQLGFVADYGGLEMFKVVCNSVQSLCQSTPAKKGKI

SEQ ID NO: 595 - DNA, 1047 bp, Escherichia coli
atgattacactttttcgactactggcgattctttgccttttttttaacgtttcagcttttgctgttgattgctatcaggatgggtacagaggaacaaccctcataaatggagatttaccaacgttcaaaattccagagaatgcgcaacctgggcaaaaaatttgggagagcggagatattaatatcacagtttattgtgacaatgcaccaggatggtcaagtaataacccatcagaaaatgtctatgcctggatcaaattgccccaaataaatagtgccgatatgttgaataatccgtatttaacatttggcgtgacttataatggtgtagattatgaagggacaaatgaaaaaattgatactcatgcgtgcctggataaatatgaacaatactataatgggtattatcatgaccctgtatgcaatggcagcactcttcaaaaaaatgtaacatttaacgcccattttcgcgtctatgtaaaattcaaaagccgcccggcaggagatcagacggtaaactttggcacagtcaacgtgctgcaattcgacggtgaaggcggggcgaacatggcccccaacgcgaaaaatttacgctatgcgattacggggttagataatatttcattccttgactgtagtgtcgacgtccgcatttccccggaaagtcagatagtcaattttgggcagatcgctgcgaattccattgcaactttcccaccgaaggcagcattcagcgtttctaccataaaagacattgcgtctgattgtaccgaacagtttgatgttgcaaccagtttctttacttcagatacattatatgacaatacgcatctggaaataggtaacggcttgctcatgcgaattactgatcaaaaaacgcaagaagatattaaatttaaccagttcaaattatttagtacttatattcccggtcagagtgcggcaatggcaacccgcgattaccaggccgaattaacccaaaaacctggtgaaccactcgtctatggcccatttcagaaagacctgatagttaaaatcaactaccac

SEQ ID NO: 596 - protein, 349 aa, Escherichia coli
MITLFRLLAILCLFFNVSAFAVDCYQDGYRGTTLINGDLPTFKIPENAQPGQKIWESGDINITVYCDNAPGWSSNNPSENVYAWIKLPQINSADMLNNPYLTFGVTYNGVDYEGTNEKIDTHACLDKYEQYYNGYYHDPVCNGSTLQKNVTFNAHFRVYVKFKSRPAGDQTVNFGTVNVLQFDGEGGANMAPNAKNLRYAITGLDNISFLDCSVDVRISPESQIVNFGQIAANSIATFPPKAAFSVSTIKDIASDCTEQFDVATSFFTSDTLYDNTHLEIGNGLLMRITDQKTQEDIKFNQFKLFSTYIPGQSAAMATRDYQAELTQKPGEPLVYGPFQKDLIVKINYH

SEQ ID NO: 597 - DNA, 7268 bp, Escherichia coli
aaataaggacgctagcggatatcagcgctagcgttccccgttattagcgcaaaattccatactcactgcacaataaccatttcaccggttcatcttcttctatcgccggaaaacgtcctcccggctcaagaaaataattatcgtgttggtcatcatttaccatcgagatttcccagccgagaacaaacgctttttccgcccagaagcgatgatacagacgcggcggcaggcaaatgccctgccccggctttagcaccagcgtttcaccaggtttcatggtacgccgctgaccatcaacactcacggtaatgactcgttgatcatcacagagattggcttcgttggcccaggccaactgcatgcataagtctccaccgccccgattgaggatatcttccattttgtgggtgtgaaaatgccagggagtctgctgatcttgttggatctgcaacattttctcagcatacggttttggatatgccgccgaccccagcgcgccgttgcgcatcgttagcagtgttagtcccgtttggttgaaatcaccacgaccaaaatcggtgatatcccaaccgagctgtaagtcgaccacttcttgccagttatcccgttcccgctgcagccagtcatccaccgtaaaataggcgaactctggcaaacaaacgcggaaggtctgcgcaatggcatgtgctttatcaataacataattaatttgtgaacgtttcattggcttctccgttgcgcatagcaagccaggcagcgccacgcattccgctactgtcgccgtgctgtgcttttacaatgggagtggtgaattgatcggtgaaaaccagtggagcgacttctgcgttcagatcggtgataagcagttccacattcgaaagcccgccgccgatcacaatcacgccagggtcaacaacattaacgatggttgccagcgtgcgggcaagctgttggcgaaaacgtgccacctgctgcatggcacaagcatcaccacgttgtgccagggtgacaatcgccgcagaagtgagcaagttaccagtcatctgttgatagcgttcactaaaaccgctgccggaaacaaacgactccacgcagttgtgtttgccgcaatagcaactgactgatggaccatcttcctgctccgtatagcctggcaacgtgatatgaccgcattcggcagcatttccccaggcccctataaacggtcgttgcttgatggcaatgccaccgccgcagcccgtaccaagcgtaataccaaataccacgtcataatcttgcccggcaccgtcgcaagcttctgatagcgcgaaacagttaccatcattggctatcaccaccggttgcccaagcaattgctgcaaatcagcctgtaacgcatgaccgttaatcacctgaatattcgcgtttttaatcaggccagtgagtggcgagatactgccgggtaaggcgatccctgtcagcatcggtcgttgaacgtcccgcctaatctgctcgataagcgccacaacgcatgagacaaattgttgatatgttgacttttgcgtcgggcagcggtaacggcgaatctcccagccatgcgcatccatgacaacggcggcgattttggtcccaccaatatccaaccccagatagtgcatatctcgttccttgttgcgtaaaaggcgggtcaccccgcccttctggcttatacagtgatgctttaccgaacgaaccgaacagtttcattttgtggcgaatgacttcccgcgccgcgttaatcgcatccggatagatgacgttcgggtcccaccagctctctttagcgagaatttcacgcactttctggaaataggcgtatttcatatcgctggagatattgattttgccgacgccgagcgtaactgattcagcaatctccgccgtccgggtttgccgaaccaccgtgtagcaccagcggaatatcaatacgtccggcaatgtcgcgcaaaatgttcatttgcagcttcggctgcatcccttttggatagatgccatgcgcctgtaccaatcgccacagccagtgtgtcggcacctgtacgagcaataaaatcggcggcctgcgccggatctgtgtaggtcacttgtgaaacaccaccttctaccgacgttcctgtttgtccgatggttcccagttcaccctcaaccgacacgccaaccgcgtgagcgaggcgaaccacttctgcggtcagcgccacgttttcttcatacggcagcagcgaaccgtcgatcattactgaggtaaatccgcagcgaatcgcacgcaaaacatgctctacagaggcaccatgatcgaggtgcagtacaaacgggaccggactacgctgggtaatttcgcgaacgtgagcgaaaaaggcatcgcccacaaaatcatgttcgctgggatggatggcaataatcgccggagtatttgtcgcttctgcttcatccacgactgcgcgaaggaaacagttatccgccacattaaatgcgccaatggcaaagccgtgctggcgggtaggttgcagtaattctttcatcgaaactaacatgttaaatctccagtttcagcgtgtagtccgccctgccggtgcgttattgcactggcataaaggccatgacagaaaatgaatcaggctttgccgatagagccgctcgcctgtaaatacggtgtaatcgcttcttcgaaggccagttccatagctttcagcgcgtccaccagttcaatggatatatcgtgacagagggtatgcaggagcgcggatttcccccgttcaaaaatggccgcccccacgttgatttttgctacccccagagtcgtacagagctggagctgatcgaacggcgtaccgctaccgccatgtaatgccagaggcacgctcgagcagtggaaaatctccgccagacgctgaaaatcaatagcaggtacaacaccaggcgcgtacatgccgtgcgccgtgcctaccgaaacggccagtagatcaatgcctgtctgcacgataaacggttccacatcagtgggttgcgtcatcatgtctgcattggcggcctggtcataacgcggcgcatctgccagatggcccagttcaccttccacgcagagctgcgcgctggcggcgagttccaccaccgccctggtctggcgcacgttttcctccaggggaaaagcagaagcatcaatcattaatccgctgaaaccagcacgaaacgcctgacgaatacagtccggatttttgccatgatcaagcgccagagcgaccggtactgaggcagattccgcgagcgttttaaccactgccgccgcgacgggtgcaggaaaatgcgccagatgcccctgatagagattgagaatgatcggagcgcgattcttctccgccacgcggatagctgcgtgagcactttccagattcatacagttgatcgccagcaaggcgtaatgttcatgccaggctttcatcaccatacttttcatatcggcaaacatagggcctccggttattcgagggtgaaagtgatctcttcatctttcagcttttgatcgctcagttcgtcaaactcttcgtcgcgttccgttaccggtttcttccagagtgaaagcatcacgccacaaatcaccgtgcctatacccagcgccaggcaaaacagcagaggatgggtgaacagaggcacaacaaacatgccgccatgcggaaccggactctccacgccccacaccatgattaagccgcccgcgaccgccgatgccaccacacaagatcccactactcgcagcaggtcacgcgcggcgatcggaatgactccttcagtgatcatgcagatccccatcggaaacgcggctttcagcgcctcgcgctccgcacgggtgtatttatggcgtgtcagtaagaacgaaagtgtgatgccaaacggagggatgattgagccgacaaatttcacggcttctggtccgtagacgccactgaccagcaagccatcggaaaacagcgacatggttttgttgaccggaccaccgaaatcgaaggttgccatcgcgccaagtatggcccccatcaggaagcgcgatccgccctgcatcgactcgagcaaatgaatcagtgcttcttgtaaccaggcgatgggtttaccaatcagcgtcatcattaacagcccaccgataatggtgcttaataccggcaacaccatgattggcatgagtccttgcatcgactgcggcaggcggatatagcgtttaagtagcaaaatggtgtagcccaccaggaaaccacccaacataccgccaataaatccggtatggatttgcccgcagagaaagccgacaatcaggcctgggacaaatccgggacgatcggcaatagaataggcaattgccgcgctaatcagcggcacaatcagccccattccccagccgccaatctgattaagcatccacgggattgttcctgttttttcaccaacatctgtaccgccaagaacttgccccaacgcaatacatatcccggcggccacaataaggggtatcatccacgagatgccggttaataaatgttttttaatttcctgtgaaaccggaattttattttctttcatattaagatccctccagtataaggatcatttgtttcccagtgatttttcgaccttttcaagaaattgaacgggcgatttaatgacgatctctgtctttactcgcacaatacgtttattggtgaagcgttcttctccttttattttcacatctacagcaagaatcacgacgtcagcagcagagatatctgccgcctgtaattcattttctgtaccaatggttccctgggtttcaactttaatggtatggcccagagcttttgctcctttgattaacttttcacgagcaatataggtatgagcaatacccgccgtacaggcggcaacacagacaatattcatgacatactccctgttatttagcagacatcggattgtgcatactgactaaagagatcaatgattttttgcggactcgtctcaactaacaattgttctatgatgtcatcatccgccagcgcgcccgcgacctgggaaagtaaacggatatgggtggtattttgatcttcaagacgtaccgcaaataaaataatacagcgcacgctactgccatccagcgtttcccagggaatatcctggcgggtacggccaattgccagcgtagtattaattaccgcagaagatttaccatgcgggatcgcaatatgattttcaaaaccagtcgagccttccgcttcgcgctgccagacatctttaataaaggtttcccgacaatcgatcgcaccatcttttttgagaagattagttaattcttcaatcgcctccgctttattcgttgcttgcatatctaaaataacgcgattcgtattcaggatttttgttatgtccattcgtcatacctcataaaattctgacattaaatttcaacgacccgagacgtcgcatgatgtaatttttccgtaatcaccatttcagtgacccgcttaatatcggcatcattaaaaaaagcggtaacataagcgaccggcatagtgactgtaggcaaattaatggtcgaaataatcagttcgatattgtcaggcaaaacctgtgataaattcgctgctgaaataacatcaacaatcgtccattcaggaaatgctcgcagaatacggcttttcagtagatgcgaagttccgattccggttgaacagaccagtaatacacgtttacgggcaatttgccgctccatcgcagcctgaaaatgaacggtcaggtaacccacttcatcctcgctcactgcattctcaccccaggttttaaatacctgattcaccacatattgcgtcaaccgccagacatccgctaattctgctttaatatcttccagcaatggattacggatatgaatgcgataatttagacggttaatcagcggcttaatatgcaccaataagccatcatataatgcgctgtcttcactaaaatcgcagtccacgatgtcactgaataccgtaattaaacgccaggtaatcagacgcgcttcattgctggcctgcatatgtgaaataatgctaacatctttttgtccatcaatcgccacacctgatgaaatgatatattgataaataaaccagacttcatcatcgggcaatgtatgtgcaattcgttgatctatcttatgaatcatctgactggcaacattaaagatattttcatcatattgtctggtttgatcttcttctcttgataacgcattcccgtgcgtgttgcgatacatcataataaggatgtgagtaaaaatgttaacgtaataaggttctcccaaagaccaacttaattcattttccatatccagtaacaatgactggacaaataacacctcttcttctccaaaataatggactaatgctttatagcttccgggatccagacgtgaatacacgacaccttgcggctcattatggttaataatgccgttaatcagtaatgccattgcctgtcggacttgcccttcactaccttcaatatgcgtaccacttggactgcggatcaacgataaccccaacggcgcaagccaggactcaattactctcaggtcattaacaatagaggctccgctgataaagtagcgttctgacaatttactgatcgacgtttcattcggtgtttcacttaataactgcgacgctattttaacgcgcctggcattattcattacacaatcaatctcttcacattctgccaccaacaaatgatcaagatgcagcaaatcagcaatattctccgcacttaacatcacacccgcgccagcacgcttctcaacatttattctccattgtcccagccattgctcaagtaaacgtaaatcacgttgaatggttttttccgaaacatttaaatagccggcaatcgtaacaatagtcgtatattcccttcgaggtaaaaggaatcgtaataatctgttttgtcgcgaggtatccatttggcatttttttaccccttatcacacccatatggaagagcttcagttgccatctctgagggtaaatataaagcagaataatttcacaacaatactaaaatctgtccgtaatccggacagtgataaaacaaagcaaggcggttaagggatatttttcagcacagatcacattttcgtgatgaataatcgtgatcatgctcgcaaatacgatggaagaaatatttattaccagatgtgagattatttaccggatacgacacaaaaccattcgtatccggcattcttc

SEQ ID NO: 598 - protein, 226 aa, Escherichia coli
MKRSQINYVIDKAHAIAQTFRVCLPEFAYFTVDDWLQRERDNWQEVVDLQLGWDITDFGRGDFNQTGLTLLTMRNGALGSAAYPKPYAEKMLQIQQDQQTPWHFHTHKMEDILNRGGGDLCMQLAWANEANLCDDQRVITVSVDGQRRTMKPGETLVLKPGQGICLPPRLYHRFWAEKAFVLGWEISMVNDDQHDNYFLEPGGRFPAIEEDEPVKWLLCSEYGILR

SEQ ID NO: 599 - DNA, 678 bp, Escherichia coli
atgaaacgttcacaaattaattatgttattgataaagcacatgccattgcgcagaccttccgcgtttgtttgccagagttcgcctattttacggtggatgactggctgcagcgggaacgggataactggcaagaagtggtcgacttacagctcggttgggatatcaccgattttggtcgtggtgatttcaaccaaacgggactaacactgctaacgatgcgcaacggcgcgctggggtcggcggcatatccaaaaccgtatgctgagaaaatgttgcagatccaacaagatcagcagactccctggcattttcacacccacaaaatggaagatatcctcaatcggggcggtggagacttatgcatgcagttggcctgggccaacgaagccaatctctgtgatgatcaacgagtcattaccgtgagtgttgatggtcagcggcgtaccatgaaacctggtgaaacgctggtgctaaagccggggcagggcatttgcctgccgccgcgtctgtatcatcgcttctgggcggaaaaagcgtttgttctcggctgggaaatctcgatggtaaatgatgaccaacacgataattattttcttgagccgggaggacgttttccggcgatagaagaagatgaaccggtgaaatggttattgtgcagtgagtatggaattttgcgc

SEQ ID NO: 600 - DNA, 930 bp, Escherichia coli
atgcactatctggggttggatattggtgggaccaaaatcgccgccgttgtcatggatgcgcatggctgggagattcgccgttaccgctgcccgacgcaaaagtcaacatatcaacaatttgtctcatgcgttgtggcgcttatcgagcagattaggcgggacgttcaacgaccgatgctgacagggatcgccttacccggcagtatctcgccactcactggcctgattaaaaacgcgaatattcaggtgattaacggtcatgcgttacaggctgatttgcagcaattgcttgggcaaccggtggtgatagccaatgatggtaactgtttcgcgctatcagaagcttgcgacggtgccgggcaagattatgacgtggtatttggtattacgcttggtacgggctgcggcggtggcattgccatcaagcaacgaccgtttataggggcctggggaaatgctgccgaatgcggtcatatcacgttgccaggctatacggagcaggaagatggtccatcagtcagttgctattgcggcaaacacaactgcgtggagtcgtttgtttccggcagcggttttagtgaacgctatcaacagatgactggtaacttgctcacttctgcggcgattgtcaccctggcacaacgtggtgatgcttgtgccatgcagcaggtggcacgttttcgccaacagcttgcccgcacgctggcaaccatcgttaatgttgttgaccctggcgtgattgtgatcggcggcgggctttcgaatgtggaactgcttatcaccgatctgaacgcagaagtcgctccactggttttcaccgatcaattcaccactcccattgtaaaagcacagcacggcgacagtagcggaatgcgtggcgctgcctggcttgctatgcgcaacggagaagccaatgaaacgttcacaaat

SEQ ID NO: 601 - protein, 321 aa, Escherichia coli
VTRLLRNKERDMHYLGLDIGGTKIAAVVMDAHGWEIRRYRCPTQKSTYQQFVSCVVALIEQIRRDVQRPMLTGIALPGSISPLTGLIKNANIQVINGHALQADLQQLLGQPVVIANDGNCFALSEACDGAGQDYDVVFGITLGTGCGGGIAIKQRPFIGAWGNAAECGHITLPGYTEQEDGPSVSCYCGKHNCVESFVSGSGFSERYQQMTGNLLTSAAIVTLAQRGDACAMQQVARFRQQLARTLATIVNVVDPGVIVIGGGLSNVELLITDLNAEVAPLVFTDQFTTPIVKAQHGDSSGMRGAAWLAMRNGEANETFTN

SEQ ID NO: 602 - DNA, 900 bp, Escherichia coli
atgttagtttcgatgaaagaattactgcaacctacccgccagcacggctttgccattggcgcatttaatgtggcggataactgtttccttcgcgcagtcgtggatgaagcagaagcgacaaatactccggcgattattgccatccatcccagcgaacatgattttgtgggcgatgcctttttcgctcacgttcgcgaaattacccagcgtagtccggtcccgtttgtactgcacctcgatcatggtgcctctgtagagcatgttttgcgtgcgattcgctgcggatttacctcagtaatgatcgacggttcgctgctgccgtatgaagaaaacgtggcgctgaccgcagaagtggttcgcctcgctcacgcggttggcgtgtcggttgagggtgaactgggaaccatcggacaaacaggaacgtcggtagaaggtggtgtttcacaagtgacctacacagatccggcgcaggccgccgattttattgctcgtacaggtgccgacacactggctgtggcgattggtacaggcgcgcatggcatctatccaaaagggatgcagccgaagctgcaaatgaacattttgcgcgacattgccggacgtattgatattccgctggtgctacacggtggttcggcaaacccggacgtattgatattccgctggtgctacacggtggttcggcaaacccggacggcggagattgctgaatcagttacgctcggcgtcggcaaaatcaatatctccagcgatatgaaatacgcctatttccagaaagtgcgtgaaattctcgctaaagagagctggtgggacccgaacgtcatctatccggatgcgattaacgcggcgcgggaagtcattcgccacaaaatgaaactgttcggttcgttcggtaaagca

SEQ ID NO: 603 - protein, 300 aa, Escherichia coli
MLVSMKELLQPTRQHGFAIGAFNVADNCFLRAVVDEAEATNTPAIIAIHPSEHDFVGDAFFAHVREITQRSPVPFVLHLDHGASVEHVLRAIRCGFTSVMIDGSLLPYEENVALTAEVVRLAHAVGVSVEGELGTIGQTGTSVEGGVSQVTYTDPAQAADFIARTGADTLAVAIGTGAHGIYPKGMQPKLQMNILRDIAGRIDIPLVLHGGSANPDVLIFRWCYTVVRQTRTAEIAESVTLGVGKINISSDMKYAYFQKVREILAKESWWDPNVIYPDAINAAREVIRHKMKLFGSFGKA

SEQ ID NO: 604 - DNA, 849 bp, Escherichia coli
atgtttgccgatatgaaaagtatggtgatgaaagcctggcatgaacattacgccttgctggcgatcaactgtatgaatctggaaagtgctcacgcagctatccgcgtggcggagaagaatcgcgctccgatcattctcaatctctatcaggggcatctggcgcattttcctgcacccgtcgcggcggcagtggttaaaacgctcgcggaatctgcctcagtaccggtcgctctggcgcttgatcatggcaaaaatccggactgtattcgtcaggcgtttcgtgctggtttcagcggattaatgattgatgcttctgcttttcccctggaggaaaacgtgcgccagaccagggcggtggtggaactcgccgccagcgcgcagctctgcgtggaaggtgaactgggccatctggcagatgcgccgcgttatgaccaggccgccaatgcagacatgatgacgcaacccactgatgtggaaccgtttatcgtgcagacaggcattgatctactggccgtttcggtaggcacggcgcacggcatgtacgcgcctggtgttgtacctgctattgattttcagcgtctggcggagattttccactgctcgagcgtgcctctggcattacatggcggtagcggtacgccgttcgatcagctccagctctgtacgactctgggggtagcaaaaatcaacgtgggggcggccatttttgaacgggggaaatccgcgctcctgcataccctctgtcacgatatatccattgaactggtggacgcgctgaaagctatggaactggccttcgaagaagcgattacaccgtatttacaggcgagcggctctatcggcaaagcc

SEQ ID NO: 605 - protein, 283 aa, Escherichia coli
MFADMKSMVMKAWHEHYALLAINCMNLESAHAAIRVAEKNRAPIILNLYQGHLAHFPAPVAAAVVKTLAESASVPVALALDHGKNPDCIRQAFRAGFSGLMIDASAFPLEENVRQTRAVVELAASAQLCVEGELGHLADAPRYDQAANADMMTQPTDVEPFIVQTGIDLLAVSVGTAHGMYAPGVVPAIDFQRLAEIFHCSSVPLALHGGSGTPFDQLQLCTTLGVAKINVGAAIFERGKSALLHTLCHDISIELVDALKAMELAFEEAITPYLQASGSIGKA

SEQ ID NO: 606 - DNA, 1917 bp, Escherichia coli
atggacataacaaaaatcctgaatacgaatcgcgttattttagatatgcaagcaacgaataaagcggaggcgattgaagaattaactaatcttctcaaaaaagatggtgcgatcgattgtcgggaaacctttattaaagatgtctggcagcgcgaagcggaaggctcgactggttttgaaaatcatattgcgatcccgcatggtaaatcttctgcggtaattaatactacgctggcaattggccgtacccgccaggatattccctgggaaacgctggatggcagtagcgtgcgctgtattattttatttgcggtacgtcttgaagatcaaaataccacccatatccgtttactttcccaggtcgcgggcgcgctggcggatgatgacatcatagaacaattgttagttgagacgagtccgcaaaaaatcattgatctctttagtcagtatgcacaatccgatgtctgcctaaataacagggagtatgtcatgaatattgtctgtgttgccgcctgtacggcgggtattgctcatacctatattgctcgtgaaaagttaatcaaaggagcaaaagctctgggccataccattaaagttgaaacccagggaaccattggtacagaaaatgaattacaggcggcagatatctctgctgctgacgtcgtgattcttgctgtagatgtgaaaataaaaggagaagaacgcttcaccaataaacgtattgtgcgagtaaagacagagatcgtcattaaatcgcccgttcaatttcttgaaaaggtcgaaaaatcactgggaaacaaatgctccttatactggagggatcttaatatgaaagaaaataaaattccggtttcacaggaaattaaaaaacatttattaaccggcatctcgtggatgataccccttattgtggccgccgggatatgtattgcgttggggcaagttcttggcggtacagatgttggtgaaaaaacaggaacaatcccgtggatgcttaatcagattggcggctggggaatggggctgattgtgccgctgattagcgcggcaattgcctattctattgccgatcgtcccggatttgtcccaggcctgattgtcggctttctctgcgggcaaatccataccggatttattggcggtatgttgggtggtttcctggtgggctacaccattttgctacttaaacgctatatccgcctgccgcagtcgatgcaaggactcatgccaatcatggtgttgccggtattaagcaccattatcggtgggctgttaatgatgacgctgattggtaaacccatcgcctggttacaagaagcactgattcatttgctcgagtcgatgcagggcggatcgcgcttcctgatgggggccatacttggcgcgatggcaaccttcgatttcggtggtccggtcaacaaaaccatgtcgctgttttccgatggcttgctggtcagtggcgtctacggaccagaagccgtgaaatttgtcggctcaatcatccctccgtttggcatcacactttcgttcttactgacacgccataaatacacccgtgcggagcgcgaggcgctgaaagccgcgtttccgatggggatctgcatgatcactgaaggagtcattccgatcgccgcgcgtgacctgctgcgagtagtgggatcttgtgtggtggcatcggcggtcgcgggcggcttaatcatggtgtggggcgtggagagtccggttccgcatggcggcatgtttgttgtgcctctgttcacccatcctctgctgttttgcctggcgctgggtataggcacggtgatttgtggcgtgatgctttcactctggaagaaaccggtaacggaacgcgacgaagagtttgacgaactgagcgatcaaaagctgaaagatgaagagatcactttcaccctcgaa

SEQ ID NO: 607 - protein, 639 aa, Escherichia coli
MDITKILNTNRVILDMQATNKAEAIEELTNLLKKDGAIDCRETFIKDVWQREAEGSTGFENHIAIPHGKSSAVINTTLAIGRTRQDIPWETLDGSSVRCIILFAVRLEDQNTTHIRLLSQVAGALADDDIIEQLLVETSPQKIIDLFSQYAQSDVCLNNREYVMNIVCVAACTAGIAHTYIAREKLIKGAKALGHTIKVETQGTIGTENELQAADISAADVVILAVDVKIKGEERFTNKRIVRVKTEIVIKSPVQFLEKVEKSLGNKCSLYWRDLNMKENKIPVSQEIKKHLLTGISWMIPLIVAAGICIALGQVLGGTDVGEKTGTIPWMLNQIGGWGMGLIVPLISAAIAYSIADRPGFVPGLIVGFLCGQIHTGFIGGMLGGFLVGYTILLLKRYIRLPQSMQGLMPIMVLPVLSTIIGGLLMMTLIGKPIAWLQEALIHLLESMQGGSRFLMGAILGAMATFDFGGPVNKTMSLFSDGLLVSGVYGPEAVKFVGSIIPPFGITLSFLLTRHKYTRAEREALKAAFPMGICMITEGVIPIAARDLLRVVGSCVVASAVAGGLIMVWGVESPVPHGGMFVVPLFTHPLLFCLALGIGTVICGVMLSLWKKPVTERDEEFDELSDQKLKDEEITFTLE

SEQ ID NO: 608 - DNA, 1545 bp, Escherichia coli
atggatacctcgcgacaaaacagattattacgattccttttacctcgaagggaatatacgactattgttacgattgccggctatttaaatgtttcggaaaaaaccattcaacgtgatttacgtttacttgagcaatggctgggacaatggagaataaatgttgagaagcgtgctggcgcgggtgtgatgttaagtgcggagaatattgctgatttgctgcatcttgatcatttgttggtggcagaatgtgaagagattgattgtgtaatgaataatgccaggcgcgttaaaatagcgtcgcagttattaagtgaaacaccgaatgaaacgtcgatcagtaaattgtcagaacgctactttatcagcggagcctctattgttaatgacctgagagtaattgagtcctggcttgcgccgttggggttatcgttgatccgcagtccaagtggtacgcatattgaaggtagtgaagggcaagtccgacaggcaatggcattactgattaacggcattattaaccataatgagccgcaaggtgtcgtgtattcacgtctggatcccggaagctataaagcattagtccattattttggagaagaagaggtgttatttgtccagtcattgttactggatatggaaaatgaattaagttggtctttgggagaaccttattacgttaacatttttactcacatccttattatgatgtatcgcaacacgcacgggaatgcgttatcaagagaagaagatcaaaccagacaatatgatgaaaatatctttaatgttgccagtcagatgattcataagatagatcaacgaattgcacatacattgcccgatgatgaagtctggtttatttatcaatatatcatttcatcaggtgtggcgattgatggacaaaaagatgttagcattatttcacatatgcaggccagcaatgaagcgcgtctgattacctggcgtttaattacggtattcagtgacatcgtggactgcgattttagtgaagacagcgcattatatgatggcttattggtgcatattaagccgctgattaaccgtctaaattatcgcattcatatccgtaatccattgctggaagatattaaagcagaattagcggatgtctggcggttgacgcaatatgtggtgaatcaggtatttaaaacctggggtgagaatgcagtgagcgaggatgaagtgggttacctgaccgttcattttcaggctgcgatggagcggcaaattgcccgtaaacgtgtattactggtctgttcaaccggaatcggaacttcgcatctactgaaaagccgtattctgcgagcatttcctgaatggacgattgttgatgttatttcagcagcgaatttatcacaggttttgcctgacaatatcgaactgattatttcgaccattaatttgcctacagtcactatgccggtcgcttatgttaccgctttttttaatgatgccgatattaagcgggtcactgaaatggtgattacggaaaaattacatcatgcgacgtctcgggtcgttgaaatt

SEQ ID NO: 609 - protein, 515 aa, Escherichia coli
MDTSRQNRLLRFLLPRREYTTIVTIAGYLNVSEKTIQRDLRLLEQWLGQWRINVEKRAGAGVMLSAENIADLLHLDHLLVAECEEIDCVMNNARRVKIASQLLSETPNETSISKLSERYFISGASIVNDLRVIESWLAPLGLSLIRSPSGTHIEGSEGQVRQAMALLINGIINHNEPQGVVYSRLDPGSYKALVHYFGEEEVLFVQSLLLDMENELSWSLGEPYYVNIFTHILIMMYRNTHGNALSREEDQTRQYDENIFNVASQMIHKIDQRIAHTLPDDEVWFIYQYIISSGVAIDGQKDVSIISHMQASNEARLITWRLITVFSDIVDCDFSEDSALYDGLLVHIKPLINRLNYRIHIRNPLLEDIKAELADVWRLTQYVVNQVFKTWGENAVSEDEVGYLTVHFQAAMERQIARKRVLLVCSTGIGTSHLLKSRILRAFPEWTIVDVISAANLSQVLPDNIELIISTINLPTVTMPVAYVTAFFNDADIKRVTEMVITEKLHHATSRVVEI

SEQ ID NO: 610 - DNA, 16066 bp, Escherichia coli
  misc_feature (1278)..(1278): unknown
  misc_feature (7096)..(7096): unknown
  misc_feature (9055)..(9055): unknown
tgatgagtattaacgagtcattgtaaattgcagtacgataatggcttccagtactggaagccattttgcatgagtgccagattgaagcagatcttcaggagtagaaataaccgaatcgtttttttcgcaaaacacagttttgagtgattccgttcagtaatcaacgctacgttatttattctcacgttgcacgagattgtatcccttttcactaacgtggtagtgaggcatagacttatgcccgctatcctcaataataaccaaaccttcgttagctaatttgttaacaatattaacaacattaccgaatcctggtatttgccttatggatagtgtgcgatcgagattcatccagttccagtttatatctttctcagtcataacgttcagcacgttaagttcatttttagtgatcacgatattctgtaccaaaattgatgagtatcttattgaaagatcacaatgtaaatcatgctcctgtaatggctggatcagaagaggttgtcttgttgttctttgataagattcaatccatattgagaaactctgtagcgtggtttagagttgccctcaccatttacgatatcaaccaacccatgattaaccagctttgttacgatattcgctacgttgccaaatcctggaatatttcgtatagctaaagtacgatccagcaccatccagctccagtcaatatctttctcagccataactttcagcacgttaaattcaactatcgtaatcgtcatttttttgcatccggatgaaataagtcagtatctttaattttaaagtcttctagagttgcagtatgtgcattattccataattcatatccatctaaaccattcggttcacctgtttcccatcctaaattacaataacgctgatactcgcggcattcatgagtatagtagttcagatcgtatttttcaggaagcaattctttatttgctattttttttagccttgaaatcattacatcattagctggatcatgatcaaatctggagatatgcttttcaacaatagcgataccttccctattgattgttacgccatctatcgtcaggttttctattggaccaccggcaaggtcgggattaaatggtcttcctgatactgctcctctggctccgaaatgctcaaatgattccaaatcagggaatctcattcttcccagaacaactccagcaactattgaagcaccagcgatgaagtaaccctttgttatccatgaacttgatctgtaaccagcaggtgcatctcctcccaacntgtttgctgtgttccctgaatccttcgatattcccattgtatatgccgccagcagcaagcagtctgccaaccgctttactattgagtgttttgaggccattattatctttagttttttgccgtggtataaacagacggttgtagttatcgggaaatgccaaatgactaaattcagtattagcaatcagatgcctggagagtatatattcataactgacagtgatggtttctgtatccagattgttctcagtaaacaggtgattgattgctgataagagcgcgccgcggagttgaatgttgtaatatttctcctatcgaccaaatctattgatccgatagaagtcaaactccatgaacaactgctcgttattgttaatagcgttaataagtaacggggagcttttgtcaatcaacttacagaaactaaggccatgtaattgtgaccctttgcctgtattcgtaatactattagatagcgagaacgcgaagatttcatcttcatggccaatctgccagcgattacctattgatgcgctcgttccgcaacgagaggaaatacatccttgttgttctccggttatggtcaggtaaatttcatcactcatctttgatgaactctctttattgcttgatgttttaaaaataaacaatattgctatttgtttataattatttactcctcaagttaatggatttaaatatgggaaataaaatgtttcactttagaccagttttcatgaggaaaatctgtaatcattaataataaacatgaatattttgcagtgattaatatttgttatgaatataatctataacaatgaagagttatcagttgttcggtgtatagccagagacgagttcagtttgtgatttttacagggcagttacagccgcaaaattttatggctgatttcaccttcccctcaagcttatctttcttaaaaagagaaataattcttaaattcaaatagttatatacaatctactctctttcttgtgactagcttcacatttcatactgatgcattggaatgaaataaaatttcatgagattttgtgttttagaaaaattatttcatgaggtgtgaaatggacgcaaagctgtacatcactgagatcatcaatgaattaaccttcgttaaggactctatccgtgaggatgactgcaccaaattgatcgacgctattcagcaaagccagcgcgttttctgctatggcctggggcgtgccggcttttccatgaaagccttcaccatgcgcctgatgcatatgggcaaagaggtttacttcctgacggaaaccattacgccgaactttgggcctggcgatctgtttatcgtttcttccgcttccggtgagacagcacaactggtggcactggcgaaaaaagcacgtcagtttggcggcgctgtggcggtgttaaccacgaatcgacacgccactatcaccgagtttgtcgacgtcatcgtgcaaatcaatgccccttccaaaaatcaaaaagattctgttttccgctcggcacagccgatggcgtcgttgtatgagcaagctttgctggtgattgccgatgcattagtgatgaagatggctgctgaaagcggtgcgccggaaagtgaactgtttaagcgccacgccaatctggaatagtcgtcgccgttatttgctcgataccctacaggagaataaaaatgagcaaaaaaataacatccttgtttaacttcaagaagttgcagaaattttcttctgctctgatgttaccaatcgccattcttccggcggcgggtttgattttagccatcgggatttcatttaacattgagctgctggcgaattgcggcggcctgattttcgccaaccttcctttgctgttttgtgtcggtattgtgattggcctgacaggtgatggttcttcatcactttcagcgattatcagttacatgatcatgaatgccacgatgggaacgcaacttggcattaccgcggagtccgttgcagccagtaacggtgactatgcgatgatcctcggggtaccgacgttacaaacgggagtgtttggcggtttgattgtcgccatctttgtttatctgctctatacccgcttccacaatattgaattgcctcagtttcttggtttcttcggtggaaaacgctttgtaccgattattacggcggtggcggcaattattgtcggctatttattgccgtggctgtggataccggtacaaaaaggtctggcgtcgctttcaacgctggtgaccagtgggcataacgcgaacttcgcggcctttatttacgccgttggcgaacgttcgctgattccttttggcctgcatcatatctggaacgtgccgttttattacaactttggcgactacatgaccaaatccgggcaactggtgacgggcgatattccggtgttctttgcccaattgcgcgacggtgttccgttgacggcggggttgtttatgacaggtcgtttcccgatcatgatgtttgcgttacctgccgccgcgttggcgatgtatcaggaagcaaaaccggaacgtaaggcgctgattaaaggccttttactctccggtgcgcttgaccacatttgttaccgggattacggagcccgctggaatatgcatttttgtttgcagctccggttctctacatcattcacatcttcttatatgccacttcatttgtgctgatgaacatcctgaatgtgcacattggtcatccttttgctggcggtcttattgatttcgtactgaatggcgttatgccaaaccgcacgccgtggtatctggtgttcctggcaggcgcgggctatgcagcgatttactacaccgtatttcgggtactgatccgcaagttgaatctgaaaacaccggggcgtgaggatgaagagattgccgttgcaaccacattaacgcgcgaagaacgtccataccaaatcatcgaagcagtaggtggtttcgacaatatcgaagatgtggatgcctgcgcaacacgcctgcggctggcgctggtagacgataagaaagtgaatgaaaaacggctgaaggagttgggggctgcgggtttagtgaaactgggtgatggcggtgtacaggtgatatttggcggcaaatcgcaaatcctgcgcgacgaaatcaaaaccgtaatgagcagaccgcgcccgacagaaatgacagtggcctgtgctaactaattcgagattagcgggctggtttcagcccgccagacagagagagctgaagtatgaattcacaattactggctaacgccatccggatgttaagtgttgatgcgatccagaaagcgaactccggtcatccgggcgcgccgatggggatggcggatattgccgaagtggtctggcgtcgtcacctgcgtcataacccaaaaaatccgcagtggtttaaccgcgaccgctatgttcagtcgaacgggcacggttccatgttgatttacgctttgctgcatcttacaggctacgacctgtcgatggatgatattcgcgactttcgtcagctccactcccgcacgccaggtcatccagaatatggttatacgccgggtgttgaaaccaccaccggcccgttggggcagggcgtagctaatgcggtggggatggcgattgcggagaaggcgctggcggcagaatttaacaaaccgggctttaatattgttgatcatcacacatggctatttttgggtgatggctgcctgatggaagggatctcccacgaggcctgtggtcttgcaggaacgctgaagctcggcaatctgattgctatctgggacgataacggtatttcgatcgatggtcacgtagaaggctggtttgctgaagatacggctgcccgttttcgtgcctacggctggcatgtcattgaaggcgttgatggtcacgatccagaagaggtagatgctgcggtgcgtgaagcgaaaagcgtcacggataagcccagtctgctgtgctgcaaaacgattatcggttttggttcgccaaataaagccaacagccacgattgccacggctcggcgctgggtgcagatgaagtggcgctggtgcgtgaacgtctgcaatggccgtatgcccctttcgaaattcctggtgaaatttatgccgcatgggatgcgaccgagaaaggcgcgcaggttcaacaggaatgggatgcactgtttgccgactacgcgaagcagtggccggaactggcggcggagtttactcgtcgcatgaagggtgatttgcctgctggctgggtcgagaatatgcagaaatatgtgcacgatctgcaatcccatccggcggcgctggcaacccgtcaggttagccagaaatgcctcaatcacttcgcagatatgctgccggaactgatgggcggctcggcggacttgtcgccctctaacctgactcgccatcagaaatcggttgatttcaccggagaaaatccggcggggaattacatctcctatggcgtgcgtgaatttggtatgtcggccatcatgaacggtcttgcgctgcatggtgggtttatcccttacggcggtactttcctgatgtttatggaatatgcgcgtaatgcactgcgtatggcggcgctgatgaagatccgctcggtgtttgtttatacccacgataccatcggcctgggcgaagacggcccgacacatcagcccgttgagcaactggcgtcgctgcgtctgacgccgaatatggaaacctggcgcggttgcgatcaggtggaagtggcggtggcctggcaacaggcgattgagcgcaaagatggcccaacgtcgttggtattaacgcgccaacctctggcgcaacagccgcgcaccgctgcacagttggcagagattgcgcgtggtggttatgtactgagtgattgtgacggtcagcctgagatgatcctcatttctgcgggttcagagattgagttagtggtcagcgccgcaaaagcgttaacggaagaagggcgtaaagttcgcgtggtttccctgccgtgtaccgagcgtttcgataatcaggatgcggcgtacaaagagtcggtattgccaaaagctgtacgcaaacgtctggcggtagaagccagcatcgccggattctgggaacgctacgtgggcctgaacggtaaagtgatcggcatgacgagctttggtgagtctgctccggcgaatgtgttgttcaaacactttggttttacgccggaaaatgtcctggcgcaggcgcgtgagctactgaacagctaaacctgcacaaggggtgaaaggatgaccttttaccccttgaaacgggagccaagaaactcttcacgggtgcggtatttctcgtaatgcgccttgtttttatacataaacaacagcaccagcatatcaataacgcccattgccggaacgcgagtggagtcgaaggcttcaaagaagattttatcgctgaccgcggtattgagttgatgggtggagagttttgataacggagatttaatatagttagtgatacaaacggatttggcaccgcgctctttcaccactttaaagatatcgaccattaagttggtgctgccagagttagaaataccaatcgccaggtcgcgtttccccatagaatatgcccgcattaatttgcatttccgggctgacgtgaacaacggtttttaatccgagttggctgaatttataagcaccataaacggccagagggtttgaatttccagcagcaaaaaagaaaatagtatcgcaattagcaagtagtttgagaatggactcaagcacttcggcattaaaaaattgcgttgattgtattaaatcttcggcctgtttntttaataagaaggttgccaaagatgttatatcgctgaagtcggtattttcaggatagctattgtcaggattaatgacttcttttgctaatgcaatttttaaatggtaataaccctgataacctaatttcttacaggtgcgtacgatagtcgcttcactggcatggcttttttctgatagttcagtgacactatagttcacgacttcatgtgcgtggctaagaatatagtcagcgacctttttttccgcctgatgcagtgtagggtaattgctttgaatcagactttttacggttatgttattcataattagtaaatttcattctgacagaaagtgctgattataacatagttttcaggcgtggataggtgtgaaaaaaatgaaggtgtgcagtgaacgtaatgattaacagaccggttaattttcatgaattacgtcaactgcacaaaaataatttaaacgggtgctctaattaaagcaagacttatatttttatcattgtattgtcaattaaatacaaattgtgtcattaattgtgggtttcttaaatattctatgcaccactgacaggctttgcccataccatcggaacgagcggcaagaaataacttggtggcgtgtttatgttcgcgcattggctttttaagcaatttaccgctgttcaataacggcaatgccagatgatgtggaatataaccaataccgacgttttgttctattaaggcgattgccgtagcgaagtcaggaacaaaaatgggtttttgtccttccaacaaccaggcttgcatcggggggaagttaacggaggtatcgcggatacaaaccgctggatagtgacgcaattcactgttttctaatggatgccgcttcgctgccagtgggtggagtgggctgacgacaaaatcccattccatttgtccgaccggttcgctaatgatgccttcactgcttggtactgcatgaggagcaccgtagaccagatcagcacgcttactgtacagcgcatcccagcagccgttgtatacctcaagatctaccgtcagtgttgttgatgtgaattgccgttcaaaatctcgaataaatgccaccagcaaatcaccaggaataatattgtttaccgcaattgtcagttcacgctcaataccatcgtgaatcagcactgtgttgcgctttaatgcttccaggtcgccaagaatagttttgctatgttcgatgaagtaacttcccgctggcgataattcaatatagcgtcccttacgaatgaacagttcaacgcccaggctctcttccgctttcttgatagtgtaactgatggcggaagggactttatttaactgctcggctgcggtggtaatgctctggtgtctggcgaccagatgaataacacgaagcgtttcgtctgagatgaacataaggctccctggtcagtggtaaagtggctgaatctctccagattcagccgtaatcattgcctgagtatacccaggaattagcggtgttgacttgcccgactgagaatcgcatacgcgatacatgccaccagaatcgagtctaccgaagggatcgtcgtcagggtgaataagccttttacggtcataaagccaaccgctgcgcctatgatccatgctgcgaatgtcagcactttaatctgtgactcctgggctaacactgactcttgatagccattacggcgataaaggaaaaagtcagcgatataaattccggcaacgggtggcgtggcgatacccaggaacagcagaaacggaataaaccacgccataatatccatactgcctacgatggcggaaaggatacccagcgccacggtaatctgccatttgggaaagcgggtaagcagtgtggaaaccaccagcgtgccctggaacatattgcccgcgttaccggtgacgcaggcgaaaatcaacaacagcgccgcaggcagaaccgcaccgaataccgncatcgcacccagtaaagatccctgaccactaatggcgctcggcgttgcacccgcccagtagagcagagggtaggcaaccagaaacgtcacgcctgcggcaatcagcgcatgtttgcggttatgcacaaaactaccgaaatcaggcagtgtggcaaccagcacaataatggtgccaacaacggtggaaacggcgacacctgtattcatctccacaatcgccgctggtactgccacttcggtatgggttgccacatagaggatgtaacacagcaccagcgcgataaccggcacggcaacttgggcaatttttcccagaacggtaaagccaaatgccgtagaggcgacaaaaatgacacagccagccgccactaacagtgccagtggaacttccagtccatgttgagccagtaagtcatgtaccgaatgaccaaacatattggcggtaacggcaatccagccgaacagacttatcgccatcaaaatgttaatggcgatggcccctttttcgccaaacgaatatttcacaatgccatacgttggcaggcgggctttttctcccacgctaatggtgatggctgaaagtaaggtcagaatgacgccgcctaacaatacgacgctaattaaactgctgctggaaagttgattgccgaggcttgaggatgacaacagtacaggtgtgacggcaatacccagcaaaatcatggcaatacgcaatcctgatgccgtattcagattctcttcttttttacgcatagtatgttccctttataaatgcgcgttacacagtatgaaaatgcccggtgtatttgcgccagctacccagttctgtaatttcccgttggccttcggtcagccagttttctgccagtacgcccagcacttcgctaccatcggcaagtttgattttgccaattgccagcccagcgggttcgctcattaacagagcggcaaaactggccagcggtaattgccaaatttctacgtcgacgtgtgttcctccttcattcacgcgaatcattcccggatggcgatcattaatactccacaaccggtaatgggcgtcagttcggtcttcacggacaaaaataccgcccgctttttgcatatttgggttgagttccaggccgcgcatcagcgttccgttaacggctaaaagcgttgtagtcattgtgttctccagagaattaaagggttatccatgtaccgctctgatgcgccagggctgcttttatggtttgcggtgaagtaatcaggccgctggcctgtttgccttgttgctggctggcattgatgaaatcaacaatggcttccactttgggttgcatactgccgacaccaaactgaccttcccgcaacagcgtttgcgcttcggcaacgctgatagcgtcgagccactgttgttgtggtgtaccaaagttaatcgctactttttctacaccggtggggatcaccagcagatctgcgcctaactgactggcgagcagcgcggaggccagatctttatcgatcacggcttccacacctttcagttgttgcccgtctcgcaccaccggaataccgccgccgccgcaggcaataaccagatatccctggcgcaccaggtgagcgatggtgtcgtgctcaataatttccagtggtgcaggagagggaactgtacgccgccaaccacgcccggcgtcctccatcagcgtccagccgagttgttgttggcgttgttgggccgttgcttcatcgagaaacgcgccaattggtttactggggctggcgaaagcatcgtcatgtgggctgactcgcgtttgtgtcaccagggcaattaccggtttgtttatgccacggcgagccaattcgttatgcagcgctttctggaacatgtagccaattgcaccttgtgtatcacccacggcgtaatcaagtggaaccggagaaacttcgttactggcgagttcagagcggcgcagaataaagcccacctgcgggccattaccgtgggttagtaccaggtcccatccggcttcaaccatatcaacgatatgctgcacgctttccatcactgcaacatattgatcgggaatactattgcgttgctcgtcctgaatgagcgcattgccgccaaccgcgacgacagccagtggcttaaccatgatggttctcctttgcgacgatctccgccagtgcacgtacagcggcgacaaaacaggccatcggcgcagtggtgatcccggcaccaatttgcccgacccccgcttgtttgtgggcgatacccgtattgatgaccggtaaaatgccgcgatcggtcactttacgcgcatcaatccctgctgcggtgggggcaaaattgagggctggaagtgtaaatgcggggttaccgccgagggtgatggcttgcatccgacggctgttattggtggcatcgacaggggtgcctcccacaaatttgacgatcgccggagacgacgccatcgcgaagccacccacacctgcggtttcagtaattgcgctatcacccaggtcagcagcagcatcgtcaacgccaaatccggggaagaacagaccttcaacggcattggcaggagcctggaaccagcgatcgccagtaccggaaagccgaataccaaaattcaccccgttacgcgccatcaccgtaaccattgaactgaacggtacattggcggcggcatccatcattgctttacaggcagccatcgacagattgaggaagaagtgatcgttaccggtgataaatgccacgacgcgctggatatgttcctgtggaagagagcaggctagcaatgccgggagcaggcgcttaatcagcaaaccggtagcggcagcattgcggttatgaacttcatcccccatatgcagcgcctgcgccattaatggcttgagttccagctcgccgtgttgtgcgattgctgctttcattgctggagccagttcatcgcgcatccaggccagacgattgagaacttcatcgttattggcgccaaaacggagaaccttacccagaccttcattgaaattgctaaaagtacggtggccgttggttttgttttctaccacccataacggcatcgacgggctgatgatgcctgccattgggccaaccgcgtgataatgatgacaaggggcaaggtcgatttcgcctgcgtttatttggttttcagcgtcttgctggctggtggcccaaccttcgtacagcatggcaccaataatcgccccttttaccggaccacacatctcttcccaggcaatcggcgggccagagtgcaaaatacgtttttgttcagccattgctggaatggcctctttagcgagcatgacatccaccagcacgggctgtgcttcgagataacgtgccatggcgatttggttggcattttctaccaggggatgacatagcaacgatgccagatccaatccagcgtcaatatcgccttgtgctggtggctgccagttgagtgcaattgcgcttcccccggcatgttgaatattgtcagcaaaactgtgtagtcccgcgttcacgaccttcaaaggctgattaaataaggtattcatacgtttagcccctttttctgcaactgagtctgtgcaacggtgctggcccatagcgccgcctgtgcattgctgctggcgatgatgacgcccgcattttgtagtgcgcttatctgctgactgcgtatttgcggatcagcttccgttccgcaaacgtgcgcaatcagcaacggtgcgttattcatgtcgatgtgtgaaagttggtccagtaattcgctggcaggcgtcgtggaagcgccataaccaagtaccaggtcgaataacacgacggcagtgtgtgagtcgttgagttcgttgagcagacgttgattgcgcagagtcgggtcgatcattggatgcggtttgccacgggtgaaatcatcgtcgcccatatcgatcaacgtgtgatcttcgctttgccagatatttgccagagcacgattacccgcaactggcgtattggaagctgcgctgaatcccttttgttggcagataagttgcgcttcgtagcagaaggttcctccggcgaaaacaccgcgtatcgcctggcgatgggctggcagacgctggcaggcgttttgtaacattgtgagatcgtcgcaggaaatctcggtctcgacagccggaagtggttgatcattcagtaacgccacggcgatgttggcggcgctggcaagtgtggtggccgcggtgatattgggacgtgccagatcatgcggattcgcaccgaggaaattcaccactacgggttttccacaagcctcggcacgctccagaatagtccgggcaacgatcggtgaaggcggttttgatataagcacaatcacgcgagtttcatcgtcttgcgccagcgcatctaaagcgaagagcatcgatattccaccaatctcttcactgagatcatgtccgcctgttcccaacgcctgagaaatacccgctccgagctggtcgattcggcaagtcacttcctgtagcccggtgcctgacgcgccaataacaccaattgctccgcgtttcaccacattagcgaagcctaacggaatgccgttaacaatggcggttccacagtcaggtcccattacgatgcgctgacgttctcgggcaagcgttttgatggatttttcctgcccgatactgacgttatcgctgaacatcatcacgttcattccgaggtttaacgctttcattgcttcggcggcggcgtagtctcccggtacagaaatgagtgccaggttggcttcgggttcggcttccagtgccatttccaggctgaccttttccggtgttttaatgccactatccgtttcatcatcgggtttgctggtcagacgttgctgggccagtaccagtgcttcattgcaaatatcttcttcacccatgactgcaatcactaaatcattgggactggcgttgatttcgttacccagacccgcatcgcgcaattgttcgagattattgggcgttcccatgacgaccgaggcctgttgaataccgggcaacttgctgatttgcgcggaaatctgcatcagagaaactgagtcctgataaagattactgaaaactttatatttaactttcatgctgttacgcctgtttcattccgcccgatagcaaaattcgggcaaagcatccccgtgtagccccataaacgggctacgggagaaaaggttgaaatcaattcatggtgttcagggttcgaaagccatgcagcattcctgcaaggcaatctactcctgacgttgcgccaaattgcatgacctgttctgcacaggatgcgattgtcattgccgatgcgctcccaaccagttgtgcgagtaactggcaaatcggttctgaaaaatgtccctgaagcgcacgctccagataatgacgactgatatccgtggtgttgtgcgcatgttgatcaattgcctgctgcaaccggtattgatgatcggcaagtggtgcagggagttgccataaccagagcgctgccagatagcccaacaaatagtcatctccatcgggtgttaagcctttaccaaagccgatcagttgtggcacctggcgttccagcgcatctggatgttccataatcgctaatccctggtgcgtgaggctatccggcaggtgcaatgtgctttgaacgttatgttccagacaaaataaaagccgttgcgatgccatcgttgggtagtgctggaaaaccaaagggaatgcctcaagtgtcagcattctccccacaaatggcgactgccagagcgttgcgttttcgagcgccacacaaaatcgaggtgtccgcagtaagccttgggttaactgaatgggatctgaatgggcaatctctcttcgccagtcccaacattcaggtagccagactctggcagcatcagggagattcagatacgtttgcgcacacaacagagtgatgaatgttcccgcgtctgaatacagatttaccgcatgtttaaaagcgctatgcagacgtaaatcttgcgtttcattctgcgggaaaagatatcccaacgacgatgcgcaaagcgtaacctgtaccatcggcgttagccttccagacctgcaataatggctttggaatcagtaacccaaccgaaaatggcaccttgtgctttgatcatctcaagggcgtatttctggaattccgggaaataggagccgacacaatcttccgggataatgcattcatagccacgatcatttgcttcgcgcacggtggtggttacgcaaacttcggttgtaacaccacaaactatcagcgtcttgataccgtggttttgcaaaatcagatgtaagtcggtttgataaaacgcgcctttgccaggcttatcaatcaccggttcgcctgccaccgggtacagttcaggaatgatgtcatgacctgcttcacctctgaccagaatgcgtcccatcggtcctggttcaccaataaaggtttttccgccgcgcgtcagtttggctggcgggcagtcgcttaagtctgcacgatggccttcacgagtatgaataaccataattcctttttgacgtgcggctgccagcacctctgtacatggtgcgatagccgtgcgtaccagtgaaacatcattgcccagtgcctcaccgaagccccctgcttcgacaaagtcacgctgcatgtcgatcatgaccagtgcagttgtgcgcggatcaaaaggtaattcaaagggttgagcctgaaaaatggattgcgtcatggtaaatctcctgtctgatgtttaaacgatccagttgttctgagaacgagtattcaggagaaaagcggcacaaaacaggaaaaaagtttgccgcacagcaacgaaatttttgcattcagcaggtggtgtgatgacgaatgtgaagggagtcaaagagtggcatacagcaacaaattttttgatgctgtatggttttgagattaaaaaaatcgttgaaattgtgtgagcttaatcatcagatttagcgactatggcgttactttttaac

SEQ ID NO: 611 - DNA, 567 bp, Escherichia coli
atgaggtgtgaaatggacgcaaagctgtacatcactgagatcatcaatgaattaaccttcgttaaggactctatccgtgaggatgactgcaccaaattgatcgacgctattcagcaaagccagcgcgttttctgctatggcctggggcgtgccggcttttccatgaaagccttcaccatgcgcctgatgcatatgggcaaagaggtttacttcctgacggaaaccattacgccgaactttgggcctggcgatctgtttatcgtttcttccgcttccggtgagacagcacaactggtggcactggcgaaaaaagcacgtcagtttggcggcgctgtggcggtgttaaccacgaatcgacacgccactatcaccgagtttgtcgacgtcatcgtgcaaatcaatgccccttccaaaaatcaaaaagattctgttttccgctcggcacagccgatggcgtcgttgtatgagcaagctttgctggtgattgccgatgcattagtgatgaagatggctgctgaaagcggtgcgccggaaagtgaactgtttaagcgccacgccaatctggaa

SEQ ID NO: 612 - protein, 189 aa, Escherichia coli
MRCEMDAKLYITEIINELTFVKDSIREDDCTKLIDAIQQSQRVFCYGLGRAGFSMKAFTMRLMHMGKEVYFLTETITPNFGPGDLFIVSSASGETAQLVALAKKARQFGGAVAVLTTNRHATITEFVDVIVQINAPSKNQKDSVFRSAQPMASLYEQALLVIADALVMKMAAESGAPESELFKRHANLE

SEQ ID NO: 613 - DNA, 1512 bp, Escherichia coli
atgagcaaaaaaataacatccttgtttaacttcaagaagttgcagaaattttcttctgctctgatgttaccaatcgccattcttccggcggcgggtttgattttagccatcgggatttcatttaacattgagctgctggcgaattgcggcggcctgattttcgccaaccttcctttgctgttttgtgtcggtattgtgattggcctgacaggtgatggttcttcatcactttcagcgattatcagttacatgatcatgaatgccacgatgggaacgcaacttggcattaccgcggagtccgttgcagccagtaacggtgactatgcgatgatcctcggggtaccgacgttacaaacgggagtgtttggcggtttgattgtcgccatctttgtttatctgctctatacccgcttccacaatattgaattgcctcagtttcttggtttcttcggtggaaaacgctttgtaccgattattacggcggtggcggcaattattgtcggctatttattgccgtggctgtggataccggtacaaaaaggtctggcgtcgctttcaacgctggtgaccagtgggcataacgcgaacttcgcggcctttatttacgccgttggcgaacgttcgctgattccttttggcctgcatcatatctggaacgtgccgttttattacaactttggcgactacatgaccaaatccgggcaactggtgacgggcgatattccggtgttctttgcccaattgcgcgacggtgttccgttgacggcggggttgtttatgacaggtcgtttcccgatcatgatgtttgcgttacctgccgccgcgttggcgatgtatcaggaagcaaaaccggaacgtaaggcgctgattaaaggccttttactctccggtgcgcttgaccacatttgtttgttaccgggattacggagcccgctggaatatgcatttttgtttgcagctccggttctctacatcattcacatcttcttatatgccacttcatttgtgctgatgaacatcctgaatgtgcacattggtcatccttttgctggcggtcttattgatttcgtactgaatggcgttatgccaaaccgcacgccgtggtatctggtgttcctggcaggcgcgggctatgcagcgatttactacaccgtatttcgggtactgatccgcaagttgaatctgaaaacaccggggcgtgaggatgaagagattgccgttgcaaccacattaacgcgcgaagaacgtccataccaaatcatcgaagcagtaggtggtttcgacaatatcgaagatgtggatgcctgcgcaacacgcctgcggctggcgctggtagacgataagaaagtgaatgaaaaacggctgaaggagttgggggctgcgggtttagtgaaactgggtgatggcggtgtacaggtgatatttggcggcaaatcgcaaatcctgcgcgacgaaatcaaaaccgtaatgagcagaccgcgcccgacagaaatgacagtggcctgtgctaac

SEQ ID NO: 614 - protein, 504 aa, Escherichia coli
MSKKITSLFNFKKLQKFSSALMLPIAILPAAGLILAIGISFNIELLANCGGLIFANLPLLFCVGIVIGLTGDGSSSLSAIISYMIMNATMGTQLGITAESVAASNGDYAMILGVPTLQTGVFGGLIVAIFVYLLYTRFHNIELPQFLGFFGGKRFVPIITAVAAIIVGYLLPWLWIPVQKGLASLSTLVTSGHNANFAAFIYAVGERSLIPFGLHHIWNVPFYYNFGDYMTKSGQLVTGDIPVFFAQLRDGVPLTAGLFMTGRFPIMMFALPAAALAMYQEAKPERKALIKGLLLSGALDHICLLPGLRSPLEYAFLFAAPVLYIIHIFLYATSFVLMNILNVHIGHPFAGGLIDFVLNGVMPNRTPWYLVFLAGAGYAAIYYTVFRVLIRKLNLKTPGREDEEIAVATTLTREERPYQIIEAVGGFDNIEDVDACATRLRLALVDDKKVNEKRLKELGAAGLVKLGDGGVQVIFGGKSQILRDEIKTVMSRPRPTEMTVACAN

SEQ ID NO: 615 - DNA, 1996 bp, Escherichia coli
atgaattcacaattactggctaacgccatccggatgttaagtgttgatgcgatccagaaagcgaactccggtcatccgggcgcgccgatggggatggcggatattgccgaagtggtctggcgtcgtcacctgcgtcataacccaaaaaatccgcagtggtttaaccgcgaccgctatgttcagtcgaacgggcacggttccatgttgatttacgctttgctgcatcttacaggctacgacctgtcgatggatgatattcgcgactttcgtcagctccactcccgcacgccaggtcatccagaatatggttatacgccgggtgttgaaaccaccaccggcccgttggggcagggcgtagctaatgcggtggggatggcgattgcggagaaggcgctggcggcagaatttaacaaaccgggctttaatattgttgatcatcacacatggctatttttgggtgatggctgcctgatggaagggatctcccacgaggcctgtggtcttgcaggaacgctgaagctcggcaatctgattgctatctgggacgataacggtatttcgatcgatggtcacgtagaaggctggtttgctgaagatacggctgcccgttttcgtgcctacggctggcatgtcattgaaggcgttgatggtcacgatccagaagaggtagatgctgcggtgcgtgaagcgaaaagcgtcacggataagcccagtctgctgtgctgcaaaacgattatcggttttggttcgccaaataaagccaacagccacgattgccacggctcggcgctgggtgcagatgaagtggcgctggtgcgtgaacgtctgcaatggccgtatgcccctttcgaaattcctggtgaaatttatgccgcatgggatgcgaccgagaaaggcgcgcaggttcaacaggaatgggatgcactgtttgccgactacgcgaagcagtggccggaactggcggcggagtttactcgtcgcatgaagggtgatttgcctgctggctgggtcgagaatatgcagaaatatgtgcacgatctgcaatcccatccggcggcgctggcaacccgtcaggttagccagaaatgcctcaatcacttcgcagatatgctgccggaactgatgggcggctcggcggacttgtcgccctctaacctgactcgccatcagaaatcggttgatttcaccggagaaaatccggcggggaattacatctcctatggcgtgcgtgaatttggtatgtcggccatcatgaacggtcttgcgctgcatggtgggtttatcccttacggcggtactttcctgatgtttatggaatatgcgcgtaatgcactgcgtatggcggcgctgatgaagatccgctcggtgtttgtttatacccacgataccatcggcctgggcgaagacggcccgacacatcagcccgttgagcaactggcgtcgctgcgtctgacgccgaatatggaaacctggcgcggttgcgatcaggtggaagtggcggtggcctggcaacaggcgattgagcgcaaagatggcccaacgtcgttggtattaacgcgccaacctctggcgcaacagccgcgcaccgctgcacagttggcagagattgcgcgtggtggttatgtactgagtgattgtgacggtcagcctgagatgatcctcatttctgcgggttcagagattgagttagtggtcagcgccgcaaaagcgttaacggaagaagggcgtaaagttcgcgtggtttccctgccgtgtaccgagcgtttcgataatcaggatgcggcgtacaaagagtcggtattgccaaaagctgtacgcaaacgtctggcggtagaagccagcatcgccggattctgggaacgctacgtgggcctgaacggtaaagtgatcggcatgacgagctttggtgagtctgctccggcgaatgtgttgttcaaacactttggttttacgccggaaaatgtcctggcgcaggcgcgtgagctactgaacagct

SEQ ID NO: 616 - protein, 665 aa, Escherichia coli
MNSQLLANAIRMLSVDAIQKANSGHPGAPMGMADIAEVVWRRHLRHNPKNPQWFNRDRYVQSNGHGSMLIYALLHLTGYDLSMDDIRDFRQLHSRTPGHPEYGYTPGVETTTGPLGQGVANAVGMAIAEKALAAEFNKPGFNIVDHHTWLFLGDGCLMEGISHEACGLAGTLKLGNLIAIWDDNGISIDGHVEGWFAEDTAARFRAYGWHVIEGVDGHDPEEVDAAVREAKSVTDKPSLLCCKTIIGFGSPNKANSHDCHGSALGADEVALVRERLQWPYAPFEIPGEIYAAWDATEKGAQVQQEWDALFADYAKQWPELAAEFTRRMKGDLPAGWVENMQKYVHDLQSHPAALATRQVSQKCLNHFADMLPELMGGSADLSPSNLTRHQKSVDFTGENPAGNYISYGVREFGMSAIMNGLALHGGFIPYGGTFLMFMEYARNALRMAALMKIRSVFVYTHDTIGLGEDGPTHQPVEQLASLRLTPNMETWRGCDQVEVAVAWQQAIERKDGPTSLVLTRQPLAQQPRTAAQLAEIARGGYVLSDCDGQPEMILISAGSEIELVVSAAKALTEEGRKVRVVSLPCTERFDNQDAAYKESVLPKAVRKRLAVEASIAGFWERYVGLNGKVIGMTSFGESAPANVLFKHFGFTPENVLAQARELLNS

SEQ ID NO: 617 - DNA, 546 bp, Escherichia coli
atgaataacataaccgtaaaaagtctgattcaaagcaattaccctacactgcatcaggcggaaaaaaaggtcgctgactatattcttagccacgcacatgaagtcgtgaactatagtgtcactgaactatcagaaaaaagccatgccagtgaagcgactatcgtacgcacctgtaagaaattaggttatcagggttattaccatttaaaaattgcattagcaaaagaagtcattaatcctgacaatagctatcctgaaaataccgacttcagcgatataacatctttggcaaccttcttattacaggccgaagatttaatacaatcaacgcaattttttaatgccgaagtgcttgagtccattctcaaactacttgctaattgcgatactattttcttttttgctgctggaaattcaaaccctctggccgtttatggtgcttataaattcagccaactcggattaaaaaccgttgttcacgtcagcccggaaatgcaaattaatgcgggcatattctatggggaaacgcgacctggcgattggtat

SEQ ID NO: 618 - protein, 185 aa, Escherichia coli
  MISC_FEATURE (102)..(102): unknown
MNNITVKSLIQSNYPTLHQAEKKVADYILSHAHEVVNYSVTELSEKSHASEATIVRTCKKLGYQGYYHLKIALAKEVINPDNSYPENTDFSDITSLATFLLXKQAEDLIQSTQFFNAEVLESILKLLANCDTIFFFAAGNSNPLAVYGAYKFSQLGLKTVVHVSPEMQINAGIFYGETRPGDWYF

SEQ ID NO: 619 - DNA, 903 bp, Escherichia coli
atgttcatctcagacgaaacgcttcgtgttattcatctggtcgccagacaccagagcattaccaccgcagccgagcagttaaataaagtcccttccgccatcagttacactatcaagaaagcggaagagagcctgggcgttgaactgttcattcgtaagggacgctatattgaattatcgccagcgggaagttacttcatcgaacatagcaaaactattcttggcgacctggaagcattaaagcgcaacacagtgctgattcacgatggtattgagcgtgaactgacaattgcggtaaacaatattattcctggtgatttgctggtggcatttattcgagattttgaacggcaattcacatcaacaacactgacggtagatcttgaggtatacaacggctgctgggatgcgctgtacagtaagcgtgctgatctggtctacggtgctcctcatgcagtaccaagcagtgaaggcatcattagcgaaccggtcggacaaatggaatgggattttgtcgtcagcccactccacccactggcagcgaagcggcatccattagaaaacagtgaattgcgtcactatccagcggtttgtatccgcgatacctccgttaacttccccccgatgcaagcctggttgttggaaggacaaaaacccatttttgttcctgacttcgctacggcaatcgccttaatagaacaaaacgtcggtattggttatattccacatcatctggcattgccgttattgaacagcggtaaattgcttaaaaagccaatgcgcgaacataaacacgccaccaagttatttcttgccgctcgttccgatggtatgggcaaagcctgtcagtggtgcatagaatatttaagaaacccacaattaatgacacaatttgtatttaat

SEQ ID NO: 620 - protein, 301 aa, Escherichia coli
MFISDETLRVIHLVARHQSITTAAEQLNKVPSAISYTIKKAEESLGVELFIRKGRYIELSPAGSYFIEHSKTILGDLEALKRNTVLIHDGIERELTIAVNNIIPGDLLVAFIRDFERQFTSTTLTVDLEVYNGCWDALYSKRADLVYGAPHAVPSSEGIISEPVGQMEWDFVVSPLHPLAAKRHPLENSELRHYPAVCIRDTSVNFPPMQAWLLEGQKPIFVPDFATAIALIEQNVGIGYIPHHLALPLLNSGKLLKKPMREHKHATKLFLAARSDGMGKACQWCIEYLRNPQLMTQFVFN

SEQ ID NO: 621 - DNA, 1216 bp, Escherichia coli
atgcgtaaaaaagaagagaatctgaatacggcatcaggattgcgtattgccatgattttgctgggtattgccgtcacacctgtactgttgtcatcctcaagcctcggcaatcaactttccagcagcagtttaattagcgtcgtattgttaggcggcgtcattctgaccttactttcagccatcaccattagcgtgggagaaaaagcccgcctgccaacgtatggcattgtgaaatattcgtttggcgaaaaaggggccatcgccattaacattttgatggcgataagtctgttcggctggattgccgttaccgccaatatgtttggtcattcggtacatgacttactggctcaacatggactggaagttccactggcactgttagtggcggctggctgtgtcatttttgtcgcctctacggcatttggctttaccgttctgggaaaaattgcccaagttgccgtgccggttatcgcgctggtgctgtgttacatcctctatgtggcaacccataccgaagtggcagtaccagcggcgattgtggagatgaatacaggtgtcgccgtttccaccgttgttggcaccattattgtgctggttgccacactgcctgatttcggtagttttgtgcataaccgcaaacatgcgctgattgccgcaggcgtgacgtttctggttgcctaccctctgctctactgggcgggtgcaacgccgagcgccattagtggtcagggatctttactgggtgcgatgttcggtgcggttctgcctgcggcgctgttgttgattttcgcctgcgtcaccggtaacgcgggcaatatgttccagggcacgctggtggtttccacactgcttacccgctttcccaaatggcagattaccgtggcgctgggtatcctttccgccatcgtaggcagtatggatattatggcgtggtttattccgtttctgctgttcctgggtatcgccacgccacccgttgccggaatttatatcgctgactttttcctttatcgccgtaatggctatcaagagtcagtgttagcccaggagtcacagattaaagtgctgacattcgcagcatggatcataggcgcagcggttggctttatgaccgtaaaaggcttattcaccctgacgacgatcccttcggtagactcgattctggtggcatgtatcgcgtatgcgattctcagtcgggcaagtcaacaccgct

SEQ ID NO: 622 - protein, 405 aa, Escherichia coli
MRKKEENLNTASGLRIAMILLGIAVTPVLLSSSSLGNQLSSSSLISVVLLGGVILTLLSAITISVGEKARLPTYGIVKYSFGEKGAIAINILMAISLFGWIAVTANMFGHSVHDLLAQHGLEVPLALLVAAGCVIFVASTAFGFTVLGKIAQVAVPVIALVLCYILYVATHTEVAVPAAIVEMNTGVAVSTVVGTIIVLVATLPDFGSFVHNRKHALIAAGVTFLVAYPLLYWAGATPSAISGQGSLLGAMFGAVLPAALLLIFACVTGNAGNMFQGTLVVSTLLTRFPKWQITVALGILSAIVGSMDIMAWFIPFLLFLGIATPPVAGIYIADFFLYRRNGYQESVLAQESQIKVLTFAAWIIGAAVGFMTVKGLFTLTTIPSVDSILVACIAYAILSRASQHR

SEQ ID NO: 623 - DNA, 951 bp, Escherichia coli
gttaagccactggctgtcgtcgcggttggcggcaatgcgctcattcaggacgagcaacgcaatagtattcccgatcaatatgttgcagtgatggaaagcgtgcagcatatcgttgatatggttgaagccggatgggacctggtactaacccacggtaatggcccgcaggtgggctttattctgcgccgctctgaactcgccagtaacgaagtttctccggttccacttgattacgccgtgggtgatacacaaggtgcaattggctacatgttccagaaagcgctgcataacgaattggctcgccgtggcataaacaaaccggtaattgccctggtgacacaaacgcgagtcagcccacatgacgatgctttcgccagccccagtaaaccaattggcgcgtttctcgatgaagcaacggcccaacaacgccaacaacaactcggctggacgctgatggaggacgccgggcgtggttggcggcgtacagttccctctcctgcaccactggaaattattgagcacgacaccatcgctcacctggtgcgccagggatatctggttattgcctgcggcggcggcggtattccggtggtgcgagacgggcaacaactgaaaggtgtggaagccgtgatcgataaagatctggcctccgcgctgctcgccagtcagttaggcgcagatctgctggtgatccccaccggtgtagaaaaagtagcgattaactttggtacaccacaacaacagtggctcgacgctatcagcgttgccgaagcgcaaacgctgttgcgggaaggtcagtttggtgtcggcagtatgcaacccaaagtggaagccattgttgatttcatcaatgccagccagcaacaaggcaaacaggccagcggcctgattacttcaccgcaaaccataaaagcagccctggcgcatcagagcggtacatggataaccctt

SEQ ID NO: 624 - protein, 347 aa, Escherichia coli
LVPGSPLRRWPVLSPLYVHWRRSSQRRTIMVKPLAVVAVGGNALIQDEQRNSIPDQYVAVMESVQHIVDMVEAGWDLVLTHGNGPQVGFILRRSELASNEVSPVPLDYAVGDTQGAIGYMFQKALHNELARRGINKPVIALVTQTRVSPHDDAFASPSKPIGAFLDEATAQQRQQQLGWTLMEDAGRGWRRTVPSPAPLEIIEHDTIAHLVRQGYLVIACGGGGIPVVRDGQQLKGVEAVIDKDLASALLASQLGADLLVIPTGVEKVAINFGTPQQQWLDAISVAEAQTLLREGQFGVGSMQPKVEAIVDFINASQQQGKQASGLITSPQTIKAALAHQSGTWITL

SEQ ID NO: 625 - DNA, 1422 bp, Escherichia coli
atgaataccttatttaatcagcctttgaaggtcgtgaacgcgggactacacagttttgctgacaatattcaacatgccgggggaagcgcaattgcactcaactggcagccaccagcacaaggcgatattgacgctggattggatctggcatcgttgctatgtcatcccctggtagaaaatgccaaccaaatcgccatggcacgttatctcgaagcacagcccgtgctggtggatgtcatgctcgctaaagaggccattccagcaatggctgaacaaaaacgtattttgcactctggcccgccgattgcctgggaagagatgtgtggtccggtaaaaggggcgattattggtgccatgctgtacgaaggttgggccaccagccagcaagacgctgaaaaccaaataaacgcaggcgaaatcgaccttgccccttgtcatcattatcacgcggttggcccaatggcaggcatcatcagcccgtcgatgccgttatgggtggtagaaaacaaaaccaacggccaccgtacttttagcaatttcaatgaaggtctgggtaaggttctccgttttggcgccaataacgatgaagttctcaatcgtctggcctggatgcgcgatgaactggctccagcaatgaaagcagcaatcgcacaacacggcgagctggaactcaagccattaatggcgcaggcgctgcatatgggggatgaagttcataaccgcaatgctgccgctaccggtttgctgattaagcgcctgctcccggcattgctagcctgctctcttccacaggaacatatccagcgcgtcgtggcatttatcaccggtaacgatcacttcttcctcaatctgtcgatggctgcctgtaaagcaatgatggatgccgccgccaatgtaccgttcagttcaatggttacggtgatggcgcgtaacggggtgaattttggtattcggctttccggtactggcgatcgctggttccaggctcctgccaatgccgttgaaggtctgttcttccccggatttggcgttgacgatgctgctgctgacctgggtgatagcgcaattactgaaaccgcaggtgtgggtggcttcgcgatggcgtcgtctccggcgatcgtcaaatttgtgggaggcacccctgtcgatgccaccaataacagccgtcggatgcaagccatcaccctcggcggtaaccccgcatttacacttccagccctcaattttgcccccaccgcagcagggattgatgcgcgtaaagtgaccgatcgcggcattttaccggtcatcaatacgggtatcgcccacaaacaagcgggggtcgggcaaattggtgccgggatcaccactgcgccgatggcctgttttgtcgccgctgtacgtgcactggcggagatcgtcgcaaaggagaaccatcatggt

SEQ ID NO: 626 - protein, 491 aa, Escherichia coli
MGQHRCTDSVAEKGAKRMNTLFNQPLKVVNAGLHSFADNIQHAGGSAIALNWQPPAQGDIDAGLDLASLLCHPLVENANQIAMARYLEAQPVLVDVMLAKEAIPAMAEQKRILHSGPPIAWEEMCGPVKGAIIGAMLYEGWATSQQDAENQINAGEIDLAPCHHYHAVGPMAGIISPSMPLWVVENKTNGHRTFSNFNEGLGKVLRFGANNDEVLNRLAWMRDELAPAMKAAIAQHGELELKPLMAQALHMGDEVHNRNAAATGLLIKRLLPALLACSLPQEHIQRVVAFITGNDHFFLNLSMAACKAMMDAAANVPFSSMVTVMARNGVNFGIRLSGTGDRWFQAPANAVEGLFFPGFGVDDAAADLGDSAITETAGVGGFAMASSPAIVKFVGGTPVDATNNSRRMQAITLGGNPAFTLPALNFAPTAAGIDARKVTDRGILPVINTGIAHKQAGVGQIGAGITTAPMACFVAAVRALAEIVAKENHHG

SEQ ID NO: 627 - DNA, 1557 bp, Escherichia coli
atgaaagttaaatataaagttttcagtaatctttatcaggactcagtttctctgatgcagatttccgcgcaaatcagcaagttgcccggtattcaacaggcctcggtcgtcatgggaacgcccaataatctcgaacaattgcgcgatgcgggtctgggtaacgaaatcaacgccagtcccaatgatttagtgattgcagtcatgggtgaagaagatatttgcaatgaagcactggtactggcccagcaacgtctgaccagcaaacccgatgatgaaacggatagtggcattaaaacaccggaaaaggtcagcctggaaatggcactggaagccgaacccgaagccaacctggcactcatttctgtaccgggagactacgccgccgccgaagcaatgaaagcgttaaacctcggaatgaacgtgatgatgttcagcgataacgtcagtatcgggcaggaaaaatccatcaaaacgcttgcccgagaacgtcagcgcatcgtaatgggacctgactgtggaaccgccattgttaacggcattccgttaggcttcgctaatgtggtgaaacgcggagcaattggtgttattggcgcgtcaggcaccgggctacaggaagtgacttgccgaatcgaccagctcggagcgggtatttctcaggcgttgggaacaggcggacatgatctcagtgaagagattggtggaatatcgatgctcttcgctttagatgcgctggcgcaagacgatgaaactcgcgtgattgtgcttatatcaaaaccgccttcaccgatcgttgcccggactattctggagcgtgccgaggcttgtggaaaacccgtagtggtgaatttcctcggtgcgaatccgcatgatctggcacgtcccaatatcaccgcggccaccacacttgccagcgccgccaacatcgccgtggcgttactgaatgatcaaccacttccggctgtcgagaccgagatttcctgcgacgatctcacaatgttacaaaacgcctgccagcgtctgccagcccatcgccaggcgatacgcggtgttttcgccggaggaaccttctgctacgaagcgcaacttatctgccaacaaaagggattcagcgcagcttccaatacgccagttgcgggtaatcgtgctctggcaaatatctggcaaagcgaagatcacacgttgatcgatatgggcgacgatgatttcacccgtggcaaaccgcatccaatgatcgacccgactctgcgcaatcaacgtctgctcaacgaactcaacgactcacacactgccgtcgtgttattcgacctggtacttggttatggcgcttccacgacgcctgccagcgaattactggaccaactttcacacatcgacatgaataacgcaccgttgctgattgcgcacgtttgcggaacggaagctgatccgcaaatacgcagtcagcagataagcgcactacaaaatgcgggcgtcatcatcgccagcagcaatgcacaggcggcgctatgggccagcaccgttgcacagactcagttgcagaaaaaggggctaaacgta

SEQ ID NO: 628 - protein, 519 aa, Escherichia coli
MKVKYKVFSNLYQDSVSLMQISAQISKLPGIQQASVVMGTPNNLEQLRDAGLGNEINASPNDLVIAVMGEEDICNEALVLAQQRLTSKPDDETDSGIKTPEKVSLEMALEAEPEANLALISVPGDYAAAEAMKALNLGMNVMMFSDNVSIGQEKSIKTLARERQRIVMGPDCGTAIVNGIPLGFANVVKRGAIGVIGASGTGLQEVTCRIDQLGAGISQALGTGGHDLSEEIGGISMLFALDALAQDDETRVIVLISKPPSPIVARTILERAEACGKPVVVNFLGANPHDLARPNITAATTLASAANIAVALLNDQPLPAVETEISCDDLTMLQNACQRLPAHRQAIRGVFAGGTFCYEAQLICQQKGFSAASNTPVAGNRALANIWQSEDHTLIDMGDDDFTRGKPHPMIDPTLRNQRLLNELNDSHTAVVLFDLVLGYGASTTPASELLDQLSHIDMNNAPLLIAHVCGTEADPQIRSQQISALQNAGVIIASSNAQAALWASTVAQTQLQKKGLNV

SEQ ID NO: 629 - DNA, 858 bp, Escherichia coli
atggtacaggttacgctttgcgcatcgtcgttgggatatcttttcccgcagaatgaaacgcaagatttacgtctgcatagcgcttttaaacatgcggtaaatctgtattcagacgcgggaacattcatcactctgttgtgtgcgcaaacgtatctgaatctccctgatgctgccagagtctggctacctgaatgttgggactggcgaagagagattgcccattcagatcccattcagttaacccaaggcttactgcggacacctcgattttgtgtggcgctcgaaaacgcaacgctctggcagtcgccatttgtggggagaatgctgacacttgaggcattccctttggttttccagcactacccaacgatggcatcgcaacggcttttattttgtctggaacataacgttcaaagcacattgcacctgccggatagcctcacgcaccagggattagcgattatggaacatccagatgcgctggaacgccaggtgccacaactgatcggctttggtaaaggcttaacacccgatggagatgactatttgttgggctatctggcagcgctctggttatggcaactccctgcaccacttgccgatcatcaataccggttgcagcaggcaattgatcaacatgcgcacaacaccacggatatcagtcgtcattatctggagcgtgcgcttcagggacatttttcagaaccgatttgccagttactcgcacaactggttgggagcgcatcggcaatgacaatcgcatcctgtgcagaacaggtcatgcaatttggcgcaacgtcaggagtagattgccttgcaggaatgctgcatggctttcgaaccctgaacaccatgaat

SEQ ID NO: 630 - protein, 286 aa, Escherichia coli
MVQVTLCASSLGYLFPQNETQDLRLHSAFKHAVNLYSDAGTFITLLCAQTYLNLPDAARVWLPECWDWRREIAHSDPIQLTQGLLRTPRFCVALENATLWQSPFVGRMLTLEAFPLVFQHYPTMASQRLLFCLEHNVQSTLHLPDSLTHQGLAIMEHPDALERQVPQLIGFGKGLTPDGDDYLLGYLAALWLWQLPAPLADHQYRLQQAIDQHAHNTTDISRHYLERALQGHFSEPICQLLAQLVGSASAMTIASCAEQVMQFGATSGVDCLAGMLHGFRTLNTMN

SEQ ID NO: 631 - DNA, 666 bp, Escherichia coli
atgacgcaatccatttttcaggctcaaccctttgaattaccttttgatccgcgcacaactgcactggtcatgatcgacatgcagcgtgactttgtcgaagcagggggcttcggtgaggcactgggcaatgatgtttcactggtacgcacggctatcgcaccatgtacagaggtgctggcagccgcacgtcaaaaaggaattatggttattcatactcgtgaaggccatcgtgcagacttaagcgactgcccgccagccaaactgacgcgcggcggaaaaacctttattggtgaaccaggaccgatgggacgcattctggtcagaggtgaagcaggtcatgacatcattcctgaactgtacccggtggcaggcgaaccggtgattgataagcctggcaaaggcgcgttttatcaaaccgacttacatctgattttgcaaaaccacggtatcaagacgctgatagtttgtggtgttacaaccgaagtttgcgtaaccaccaccgtgcgcgaagcaaatgatcgtggctatgaatgcattatcccggaagattgtgtcggctcctatttcccggaattccagaaatacgcccttgagatgatcaaagcacaaggtgccattttcggttgggttactgattccaaagccattattgcaggtctggaaggc

SEQ ID NO: 632 - protein, 222 aa, Escherichia coli
MTQSIFQAQPFELPFDPRTTALVMIDMQRDFVEAGGFGEALGNDVSLVRTAIAPCTEVLAAARQKGIMVIHTREGHRADLSDCPPAKLTRGGKTFIGEPGPMGRILVRGEAGHDIIPELYPVAGEPVIDKPGKGAFYQTDLHLILQNHGIKTLIVCGVTTEVCVTTTVREANDRGYECIIPEDCVGSYFPEFQKYALEMIKAQGAIFGWVTDSKAIIAGLEG

SEQ ID NO: 633 - DNA, 708 bp, Escherichia coli
ttgctaatactgaatttagtcatttggcatttcccgataactacaaccgtctgtttataccacggcaaaaaactaaagataataatggcctcaaaacactcaatagtaaagcggttggcagactgcttgctgctggcggcatatacaatgggaatatcgaaggattcagggaacacagcaaacggaggagatgcacctgctggttacagatcaagttcatggataacaaagggttacttcatcgctggtgcttcaatagttgctggagttgttctgggaagaatgagattccctgatttggaatcatttgagcatttcggagccagaggagcagtatcaggaagaccatttaatcccgaccttgccggtggtccaatagaaaacctgacgatagatggcgtaacaatcaatagggaaggtatcgctattgttgaaaagcatatctccagatttgatcatgatccagctaatgatgtaatgatttcaaggctaaaaaaaatagcaaataaagaattgcttcctgaaaaatacgatctgaactactatactcatgaatgccgcgagtatcagcgttattgtaatttaggatgggaaacaggtgaaccgaatggtttagatggatatgaattatggaataatgcacatactgcaactctagaagactttaaaattaaagatactgacttatttcatccggatgcaaaaaaa

SEQ ID NO: 634 - protein, 236 aa, Escherichia coli
LLILNLVIWHFPITTTVCLYHGKKLKIIMASKHSIVKRLADCLLLAAYTMGISKDSGNTANGGDAPAGYRSSSWITKGYFIAGASIVAGVVLGRMRFPDLESFEHFGARGAVSGRPFNPDLAGGPIENLTIDGVTINREGIAIVEKHISRFDHDPANDVMISRLKKIANKELLPEKYDLNYYTHECREYQRYCNLGWETGEPNGLDGYELWNNAHTATLEDFKIKDTDLFHPDAKK

SEQ ID NO: 635 - DNA, 5602 bp, Escherichia coli
gaaataaaaaaacgctccccaacttcggggagcgatatcagttattgacgccgtaaacgcattattttgcggattattggcgtcagtagcgtaaaggctgccagagtcagcaatgccagagtgatcggtcgggtatacagaaagtcgagtgaaccccctgaaagcgacagcgcacggcgaaaattactttccgccattggccccataatcaatgccaggaccactggcgacgccggatatccccctttctgcatgaaatagcccactacgcccgcaatcaacataatgccgacatcaaacaggctgttgttcagtgcataagtcccgaccacacaaagtgcgaggatcatcggtgtgagaatattgccgggaattttcaccacattaccgatgactttcaaagagagcagtccaagaactagtagcatgaagtaacagaagatcatgccgacaaacagcgtataaaccatatcaccgtggtcggtaaacatcagcgggcctggttgcattccctgtaacgttaacgcgcccagcatgatggcggttaccgcatcgccagggatccccagcgtcagcataggtaacaatgcgccaccggtgcagccattcgcgcctgcctcacaggaggccacagctttaatttcacccttaccaaagttttctggtgtcttactgaaacgacgagtttcgttataggcaacaaaagctgcaatatccgcccccgcaccggggatcatgccgataaaaacccctaatcctgatgagcgcaaaatggttaatgcgatgcggcgtagtgtttgccagggcagtaacagactgccgatagccaccttcgcgccccgacgaatttgctggttttgctccatagagcggaatgcttctgaagcagcaaataaaccaatcatcaccgggataaatggcacattcatcagctccacaaatccacctgtaaaccgtggaaaaccgcccattggatcaaggcctatcgttgcgatcagcaatccgccaaccccggcaatcagccccttaatcagcgactcaccggaaatactggcaataatgctcagtccgaaggttgccagggcgaaggactccgaggcactaaatttcagcgcccaactggcaagtaccggagagagaaacatcagcacgataatgctgagcgttccgccactaaaggaagagaacgtggcggcactcaatgccagccctgcttttccctgtttcgtcagctcataaccatcaatagcggtggctgcggcggcaggcgttccgggaattttgagcaaaattgcggtgatagaaccaccgtagacgccaccaaaaaagacgccgcaaatcatcaacaatccagaaacaggctccatgccgtaggtgaaaggcagcaaaatcgccacacccatggtcgctgtcagaccaggcaaagcgccaatcacaatacccagcatcaccccaaaagtggcaaacagcagcgcctgaggattattgagtaatgtcgaaaaaccctgagttaaaagttcactttcaaacattgctggcccctgttattcgaaaaatgtgccgacaggcaatggcacctgtaacgcttcgacaaacagcaaccagaggattgccgttaacagcagcgcaatacccggtgtgagtacccatcgcctgtagcccatcaacgtcataatgacgatgaggaaaacaggagtagtaatgagataaccgcagtagctcatcgccacaatataaaacgcggttgccgcaattcctgttgctgttttcctgaatgccggtttttcctgtgcgttggcgcaagaggctggttttgcctgcaaaagatcgcgtatcaccagcaagacagcgagcacaatcagggcacaggcatagaaggtagggaaggcacttgcaccgggatccgtttcaatggcagttgctggaaaatcagcggcattaatcatcaccgcgccagcaaccacacaaagtaacagcgccaccaccatcgttgatgaaaggcgcttgcggtgcggtacggcgagttgagcaacagactgttttgtgttcatcaaccgtacctcaggtttattttttcaggcccaggcgagtcagcaactcgtcaaagtacttttcctgttcgctgatttgggtctggaagctggcagcgtcaagccatgcatagttgagattcaacttttgcagtgcatcctggaatgcaggctcttcagccgtctcttttgctgcctttgccagaacatccaccacatcctgcggcgttttttgcgacacaatcaggccgcgccaggtgccgatggagagatcaacgcctttctcttttaacgtcgggacgtcaggcatggttttcattcgctcatccgccatcactaccagtgtcttcagcttgccgccattcacatggttgataacttctcctgggcttacggaaaccgcttcaatatgcccgcctaacaggcctgtaatggcaggggctgcgccgtcatacgggacatgagaaaactttgtgcccgttttgtcttccagtgcagctgccgccagatgccagatagctccggtgcctgagttaccaatgcgtacttttccgggattcgctttggagtaagccataaattcttcatagctattccacggcgcatcggcacggactgtgatagcagccggatccgcattcagacgggcaatgggtttaaagtcgctggttttaaaacgcaccattccgaggctgggaagggtggtcagttcaaccgtgcctaaaccaattttgtaaccgttagggcgggcagcggcgatttcactcaggccgatagcaccgcctccgccaggtttattgataaccccgatgctgacgggtaaatggtttttggcggcatcagcaaaggcacgggcaaccagatccgtaccgcctccggcagcgtagggaacgactaactcgatctgtttggttgggtaggaggctgcctgtacaggcgcaatgctgagggcagcgcctgcaagaagtaccattgcagcatttttttcggtaaggtaagatgttttatcattgcttttatatccttatttatcagttagttgctatttaaattgttccatgcgttcataaacagtactgcattttcatagacttgctctggcgtcatgccggggcgatatagcgcagaaccgaggccaaagccgtttgcgccgtggctcagataacgcgccatggtttccggtgtgataccgccaaccggtaacatcggaacggattgtggaataaccgcacgccaggctttggtaacttctggcgtaatttgttcagccgggaacagcttgatggcattagcaccatgttcaatggcagcaaaggcttcggtgggcgtggcgacgccaggcgcacaatacatacccagcgcacgggcgcgacggatcaccgcagtatcgcaatgcggcatcacgataatctggcccccagcctctttaaccgcaaccacctgctctaccgaaagcacagttccggctccgaccaggcagtccttaggcagggcgtcgcgcagtatactgatactttgcaacgcctccggcgagttcataggaatctcaatcaggcggaatccggcggcgtacagtttttcaccgatggcgacaatctcatccggtttcacgccgcgtaaaatggcgactaacccggttttttgcaaaagcgtattaaatggcatgggtacattccctggcgttggtggacagtaacccggcagcgtgggcgattcgccataatccctgttcagtggcattaggaatggcgtgtatctgtctgccgggaaaaacgtggctgaatgcttgtgaatagcggctgttcagatttgcgctaccgattaaggcgatcggtgttgtggcgggtaaatcacgtagcaaactggatgccagaccacataattcatggcctatcagtaatccggaaaggtaatccccctgcgaggacgacgtaagattactggtcagcaggcgcgaacgggtcgaaaacagcgtcgataataatccggtctgatgatgctcttgtgctgctgtcagcccgtgggtgaaggcatcccagtgcggttcatctccaggatgcatggtggcaccgagaatcgaatggcgggataaaacatcaaataactcgcccgtcataaaggttcggaaatcggtaatggtgttgttttcaactactgcccatttcgcatgtgtgccgggtaagcctatcagcactggcataccctgatggatcgcgttttgcagggccggttccatcgagatagcaccgaagatttgtgtttcttcgccacgcatcacttcgggcatttcaccttctttaatcacgccaggaatgatatgcagcattgtctgctgctggtggataacaggcgtcaactgcttcgccagaccctcgagagtgaccgggcaaggtaaataagctgctgattgccacccttgcgcactgccgagcatgccgcaagccagtaccgggcatggggtttgtgccagccagtcgccgcagacacgtaaaaacgtatcgtggaaagcgtcctcacgtgttgctgcctgggagggtaatttcatgatcccccaggggaattcacgtttttcttgtggatttggtgattcgccaaaacgccatgcccgaagcgatgacgttccccagtccagggcaataaatgagggtgctcccggcattagtcgtttcctttaatcatggtttatttatctttgcggacgtgcttaccccagcccagttcagcggatatctcttctgcacaggatttgacgtaaggtgccagttcttccagacgcgccagcgacatatacgtggtggtactggcgacagaaatagccgccacaatttcatcccgggcgttgtaaaccggcgctgcaacgcaacggatagtcggctcgttctcttccagatcaaaagcaaaaccactggcggcataacgacgcatgttctgaataaatgtgcccagttttgtttcatcaccacaggtcttaaacagcgtgcgccactcttcttctgttcggttgaggatcaatgccttgccgatgccggtgattgccagtggcatgcgatggcctgggcgtgagcgcatttccagcccgcgctgactgttgatcttctccagatacagcacttcgtcgccttcaacgatccccagatgcacggtgtccagggtgtaacgggcaaggcgttgcaaaacgggctgggcaatttcgtacagcgaggtgctttccagtgctctggcaccaaattcgatcagtttggcacccagttggtagccctgcgttgggacatggcgcagatagcgttgttccaccagaacggtgactaaacgatgggttgtgctccgggtcgtgccggtgaactcgccgatactttttaggtcatggcagccgttataaacagcattaagaaccgccagtccacgtaataacgtttgtgcgcctgcggtggttgaagaggtttctgccatacgtttctcctgatgatattgctgaagtgttccacataatgacgtggggaaaaggtgatatatcccacaatataaactccatctcatattgtgggataaaataatgaaaattaacgatcgtt

SEQ ID NO: 636 - DNA, 1488 bp, Escherichia coli
atgtttgaaagtgaacttttaactcagggtttttcgacattactcaataatcctcaggcgctgctgtttgccacttttggggtgatgctgggtattgtgattggcgctttgcctggtctgacagcgaccatgggtgtggcgattttgctgcctttcacctacggcatggagcctgtttctggattgttgatgatttgcggcgtcttttttggtggcgtctacggtggttctatcaccgcaattttgctcaaaattcccggaacgcctgccgccgcagccaccgctattgatggttatgagctgacgaaacagggaaaagcagggctggcattgagtgccgccacgttctcttcctttagtggcggaacgctcagcattatcgtgctgatgtttctctctccggtacttgccagttgggcgctgaaatttagtgcctcggagtccttcgccctggcaaccttcggactgagcattattgccagtatttccggtgagtcgctgattaaggggctgattgccggggttggcggattgctgatcgcaacgataggccttgatccaatgggcggttttccacggtttacaggtggatttgtggagctgatgaatgtgccatttatcccggtgatgattggtttatttgctgcttcagaagcattccgctctatggagcaaaaccagcaaattcgtcggggcgcgaaggtggctatcggcagtctgttactgccctggcaaacactacgccgcatcgcattaaccattttgcgctcatcaggattaggggtttttatcggcatgatccccggtgcgggggcggatattgcagcttttgttgcctataacgaaactcgtcgtttcagtaagacaccagaaaactttggtaagggtgaaattaaagctgtggcctcctgtgaggcaggcgcgaatggctgcaccggtggcgcattgttacctatgctgacgctggggatccctggcgatgcggtaaccgccatcatgctgggcgcgttaacgttacagggaatgcaaccaggcccgctgatgtttaccgaccacggtgatatggtttatacgctgtttgtcggcatgatcttctgttacttcatgctactagttcttggactgctctctttgaaagtcatcggtaatgtggtgaaaattcccggcaatattctcacaccgatgatcctcgcactttgtgtggtcgggacttatgcactgaacaacagcctgtttgatgtcggcattatgttgattgcgggcgtagtgggctatttcatgcagaaagggggatatccggcgtcgccagtggtcctggcattgattatggggccaatggcggaaagtaattttcgccgtgcgctgtcgctttcagggggttcactcgactttctgtatacccgaccgatcactctggcattgctgactctggcagcctttacgctactgacgccaataatccgcaaaataatgcgtttacggcgtcaa

SEQ ID NO: 637 - protein, 496 aa, Escherichia coli
MFESELLTQGFSTLLNNPQALLFATFGVMLGIVIGALPGLTATMGVAILLPFTYGMEPVSGLLMICGVFFGGVYGGSITAILLKIPGTPAAAATAIDGYELTKQGKAGLALSAATFSSFSGGTLSIIVLMFLSPVLASWALKFSASESFALATFGLSIIASISGESLIKGLIAGVGGLLIATIGLDPMGGFPRFTGGFVELMNVPFIPVMIGLFAASEAFRSMEQNQQIRRGAKVAIGSLLLPWQTLRRIALTILRSSGLGVFIGMIPGAGADIAAFVAYNETRRFSKTPENFGKGEIKAVASCEAGANGCTGGALLPMLTLGIPGDAVTAIMLGALTLQGMQPGPLMFTDHGDMVYTLFVGMIFCYFMLLVLGLLSLKVIGNVVKIPGNILTPMILALCVVGTYALNNSLFDVGIMLIAGVVGYFMQKGGYPASPVVLALIMGPMAESNFRRALSLSGGSLDFLYTRPITLALLTLAAFTLLTPIIRKIMRLRRQ

SEQ ID NO: 638 - DNA, 507 bp, Escherichia coli
ttgatgaacacaaaacagtctgttgctcaactcgccgtaccgcaccgcaagcgcctttcatcaacgatggtggtggcgctgttactttgtgtggttgctggcgcggtgatgattaatgccgctgattttccagcaactgccattgaaacggatcccggtgcaagtgccttccctaccttctatgcctgtgccctgattgtgctcgctgtcttgctggtgatacgcgatcttttgcaggcaaaaccagcctcttgcgccaacgcacaggaaaaaccggcattcaggaaaacagcaacaggaattgcggcaaccgcgttttatattgtggcgatgagctactgcggttatctcattactactcctgttttcctcatcgtcattatgacgttgatgggctacaggcgatgggtactcacaccgggtattgcgctgctgttaacggcaatcctctggttgctgtttgtcgaagcgttacaggtgccattgcctgtcggcacatttttcgaa

SEQ ID NO: 639 - protein, 169 aa, Escherichia coli
LMNTKQSVAQLAVPHRKRLSSTMVVALLLCVVAGAVMINAADFPATAIETDPGASAFPTFYACALIVLAVLLVIRDLLQAKPASCANAQEKPAFRKTATGIAATAFYIVAMSYCGYLITTPVFLIVIMTLMGYRRWVLTPGIALLLTAILWLLFVEALQVPLPVGTFFE

SEQ ID NO: 640 - DNA, 933 bp, Escherichia coli
atggtacttcttgcaggcgctgccctcagcattgcgcctgtacaggcagcctcctacccaaccaaacagatcgagttagtcgttccctacgctgccggaggcggtacggatctggttgcccgtgcctttgctgatgccgccaaaaaccatttacccgtcagcatcggggttatcaataaacctggcggaggcggtgctatcggcctgagtgaaatcgccgctgcccgccctaacggttacaaaattggtttaggcacggttgaactgaccacccttcccagcctcggaatggtgcgttttaaaaccagcgactttaaacccattgcccgtctgaatgcggatccggctgctatcacagtccgtgccgatgcgccgtggaatagctatgaagaatttatggcttactccaaagcgaatcccggaaaagtacgcattggtaactcaggcaccggagctatctggcatctggcggcagctgcactggaagacaaaacgggcacaaagttttctcatgtcccgtatgacggcgcagcccctgccattacaggcctgttaggcgggcatattgaagcggtttccgtaagcccaggagaagttatcaaccatgtgaatggcggcaagctgaagacactggtagtgatggcggatgagcgaatgaaaaccatgcctgacgtcccgacgttaaaagagaaaggcgttgatctctccatcggcacctggcgcggcctgattgtgtcgcaaaaaacgccgcaggatgtggtggatgttctggcaaaggcagcaaaagagacggctgaagagcctgcattccaggatgcactgcaaaagttgaatctcaactatgcatggcttgacgctgccagcttccagacccaaatcagcgaacaggaaaagtactttgacgagttgctgactcgcctgggcctgaaaaaa

SEQ ID NO: 641 - protein, 311 aa, Escherichia coli
MVLLAGAALSIAPVQAASYPTKQIELVVPYAAGGGTDLVARAFADAAKNHLPVSIGVINKPGGGGAIGLSEIAAARPNGYKIGLGTVELTTLPSLGMVRFKTSDFKPIARLNADPAAITVRADAPWNSYEEFMAYSKANPGKVRIGNSGTGAIWHLAAAALEDKTGTKFSHVPYDGAAPAITGLLGGHIEAVSVSPGEVINHVNGGKLKTLVVMADERMKTMPDVPTLKEKGVDLSIGTWRGLIVSQKTPQDVVDVLAKAAKETAEEPAFQDALQKLNLNYAWLDAASFQTQISEQEKYFDELLTRLGLKK

SEQ ID NO: 642 - DNA, 702 bp, Escherichia coli
atgccactgaacagggattatggcgaatcgcccacgctgccgggttactgtccaccaacgccagggaatgtacccatgccatttaatacgcttttgcaaaaaaccgggttagtcgccattttacgcggcgtgaaaccggatgagattgtcgccatcggtgaaaaactgtacgccgccggattccgcctgattgagattcctatgaactcgccggaggcgttgcaaagtatcagtatactgcgcgacgccctgcctaaggactgcctggtcggagccggaactgtgctttcggtagagcaggtggttgcggttaaagaggctgggggccagattatcgtgatgccgcattgcgatactgcggtgatccgtcgcgcccgtgcgctgggtatgtattgtgcgcctggcgtcgccacgcccaccgaagcctttgctgccattgaacatggtgctaatgccatcaagctgttcccggctgaacaaattacgccagaagttaccaaagcctggcgtgcggttattccacaatccgttccgatgttaccggttggcggtatcacaccggaaaccatggcgcgttatctgagccacggcgcaaacggctttggcctcggttctgcgctatatcgccccggcatgacgccagagcaagtctatgaaaatgcagtactgtttatgaacgcatggaacaatttaaatagcaac

SEQ ID NO: 643 - protein, 234 aa, Escherichia coli
MPLNRDYGESPTLPGYCPPTPGNVPMPFNTLLQKTGLVAILRGVKPDEIVAIGEKLYAAGFRLIEIPMNSPEALQSISILRDALPKDCLVGAGTVLSVEQVVAVKEAGGQIIVMPHCDTAVIRRARALGMYCAPGVATPTEAFAAIEHGANAIKLFPAEQITPEVTKAWRAVIPQSVPMLPVGGITPETMARYLSHGANGFGLGSALYRPGMTPEQVYENAVLFMNAWNNLNSN

SEQ ID NO: 644 - DNA, 1002 bp, Escherichia coli
atgccgggagcaccctcatttattgccctggactggggaacgtcatcgcttcgggcatggcgttttggcgaatcaccaaatccacaagaaaaacgtgaattcccctgggggatcatgaaattaccctcccaggcagcaacacgtgaggacgctttccacgatacgtttttacgtgtctgcggcgactggctggcacaaaccccatgcccggtactggcttgcggcatgctcggcagtgcgcaagggtggcaatcagcagcttatttaccttgcccggtcactctcgagggtctggcgaagcagttgacgcctgttatccaccagcagcagacaatgctgcatatcattcctggcgtgattaaagaaggtgaaatgcccgaagtgatgcgtggcgaagaaacacaaatcttcggtgctatctcgatggaaccggccctgcaaaacgcgatccatcagggtatgccagtgctgataggcttacccggcacacatgcgaaatgggcagtagttgaaaacaacaccattaccgatttccgaacctttatgacgggcgagttatttgatgttttatcccgccattcgattctcggtgccaccatgcatcctggagatgaaccgcactgggatgccttcacccacgggctgacagcagcacaagagcatcatcagaccggattattatcgacgctgttttcgacccgttcgcgcctgctgaccagtaatcttacgtcgtcctcgcagggggattacctttccggattactgataggccatgaattatgtggtctggcatccagtttgctacgtgatttacccgccacaacaccgatcgccttaatcggtagcgcaaatctgaacagccgctattcacaagcattcagccacgtttttcccggcagacagatacacgccattcctaatgccactgaacagggattatggcgaatcgcccacgctgccgggttactgtccaccaacgccagggaatgtacccatgccatt

SEQ ID NO: 645 - protein, 334 aa, Escherichia coli
MPGAPSFIALDWGTSSLRAWRFGESPNPQEKREFPWGIMKLPSQAATREDAFHDTFLRVCGDWLAQTPCPVLACGMLGSAQGWQSAAYLPCPVTLEGLAKQLTPVIHQQQTMLHIIPGVIKEGEMPEVMRGEETQIFGAISMEPALQNAIHQGMPVLIGLPGTHAKWAVVENNTITDFRTFMTGELFDVLSRHSILGATMHPGDEPHWDAFTHGLTAAQEHHQTGLLSTLFSTRSRLLTSNLTSSSQGDYLSGLLIGHELCGLASSLLRDLPATTPIALIGSANLNSRYSQAFSHVFPGRQIHAIPNATEQGLWRIAHAAGLLSTNARECTHAI

SEQ ID NO: 646 - DNA, 852 bp, Escherichia coli
atgagatggagtttatattgtgggatatatcaccttttccccacgtcattatgtggaacacttcagcaatatcatcaggagaaacgtatggcagaaacctcttcaaccaccgcaggcgcacaaacgttattacgtggactggcggttcttaatgctgtttataacggctgccatgacctaaaaagtatcggcgagttcaccggcacgacccggagcacaacccatcgtttagtcaccgttctggtggaacaacgctatctgcgccatgtcccaacgcagggctaccaactgggtgccaaactgatcgaatttggtgccagagcactggaaagcacctcgctgtacgaaattgcccagcccgttttgcaacgccttgcccgttacaccctggacaccgtgcatctggggatcgttgaaggcgacgaagtgctgtatctggagaagatcaacagtcagcgcgggctggaaatgcgctcacgcccaggccatcgcatgccactggcaatcaccggcatcggcaaggcattgatcctcaaccgaacagaagaagagtggcgcacgctgtttaagacctgtggtgatgaaacaaaactgggcacatttattcagaacatgcgtcgttatgccgccagtggttttgcttttgatctggaagagaacgagccgactatccgttgcgttgcagcgccggtttacaacgcccgggatgaaattgtggcggctatttctgtcgccagtaccaccacgtatatgtcgctggcgcgtctggaagaactggcaccttacgtcaaatcctgtgcagaagagatatccgctgaactgggctggggtaagcacgtccgcaaagataaa

SEQ ID NO: 647 - protein, 284 aa, Escherichia coli
MRWSLYCGIYHLFPTSLCGTLQQYHQEKRMAETSSTTAGAQTLLRGLAVLNAVYNGCHDLKSIGEFTGTTRSTTHRLVTVLVEQRYLRHVPTQGYQLGAKLIEFGARALESTSLYEIAQPVLQRLARYTLDTVHLGIVEGDEVLYLEKINSQRGLEMRSRPGHRMPLAITGIGKALILNRTEEEWRTLFKTCGDETKLGTFIQNMRRYAASGFAFDLEENEPTIRCVAAPVYNARDEIVAAISVASTTTYMSLARLEELAPYVKSCAEEISAELGWGKHVRKDK

SEQ ID NO: 648 - DNA, 2702 bp, Escherichia coli
tcctccttcttattttatttattcactattaatcgctttttcttatggctgatagttttatcttgccgaagcgtgcttttttgttattgtctttatgaaatcttcttataaaacaaatatataaatattttatattgatgagttatttgtatttataccatcaataaaatccgttaattagcctgtttataagtgaataaaggaatagccgatgatcgaacactatattcgtgggtttgaggaagaacttcgcgagatccgccatcagatccacgaaaacccggagctgggattacaagaatttaaaaccagtgctttggttgcggaaaagctgcgccagtggggctatgaggttgagcaagggctggcgacaaccggcgtggtagccacgttaaaagtgggcgacggagagaaaagtattggcctgcgggcggatatggatgcgttgccgatttatgaaaatagtggcaagccctgggccagtaaacatcctggtttaatgcacgcctgcgggcatgacgggcataccaccatactgctgggggctgcgcgttattttgccgaaacccgccgttttaacggcacgttacgccttatcttccagcctgcggaagagatgattaacggcggtgagatcatggttaaagaggggctttttgatcgtttcccctgcgatgtcattttcgggatgcacaacatgccgggtttgccggtcggcaagtttttcttccagcctggggcgctgatggcgtcaatggatcagttccatattacggttcgtggttgtggcggacacggtgcgatcccgcacaaagccatcgatccagtgctggttgctgcacatatcaccaccgcattacaaagcattgtgtcgcgcaatgtcgatccgctggaagcggcggtaattaccgtcggcagcattgttgcgggtgaggcggctaacgtcattcctgacagtgctgagatgaaaatcagtgtccgctctcttagccgcgatacccgacaacttcttctgacccgtattcctgctcttgcacaagcccaggctgccagctttggcgctacggctgaggttacgcatgttaacggtacaccggtattagtaaatgacgaggagatggcgcgcttcgcctggcaggtggcgtgcaaaacatttggtgaagatcgggctgagtttggcatcaaacccctgatgggcagtgaagatttctctttcatgctggaagcccaacccaaaggcggtttcctgttattcggtaatggcgatgtcggggaaggttcctgcatggtgcataaccccggttacgactttaacgatgcaagcctggtcccggcaagcagctactggggcgcactggttgaagcctggctgcaataaataaaacaacacacaacaacactttttggcaaggaacatggaatgacggcgatcgtaaatgaaaccgtgagtgtgaagaaaaagcccagcggcaggcgggtgatctttgcctcggcgtttggcaatgcgctcgaattttttgattttggcgtttacaacttttttgtggtctatatcagtacgcttttcttcccacccagtgccgatcataacgtcgcgctgttactggcatttgcaacgtttggtgtgagcttttttatgcgtccgctcggtgggattatcgttggtgcctgggccgatcgcttcgggcgtaaaccggcgatggtgttcactattgctctgatgagcctcggtacgctgatgatcggcatcgcaccgacgtatgaaacggcgggctattggggaaccgcaacgctggtgctggcgcgtctaattcagggtgttgcggcaggtggtgaagtcggggcttcaatgtcgctactggtggagtcagctccggcaaatcgtcgcggcttttacagcagttggtcactggcgacccaagggctggcaacgaccttcggtggggttgttgctttaggtctgagcgcatggctaccgttcgccacaggttcagaaaccgtaatggcagaatggggctggcgtgtgccgttttttattggcgtgttattagcacctatcggttgctggttgcgtctgagcctggaaaatgacgtacctgagccagtgcgcaataaaaaagctgctaccagcgaaagcgcgttttctctgctcctgcaacataaggcgactatcgttaatggcgttttactcgctattggtagcacggtcgcaacctatatctccctcttttattacggcacctgggcggcgaagtatctggcgatgcctcaacattattctcatgcagcgatgttactggcgggggtaattacgtttgtgggtgcgctgttggtggggatgctatgtgattcggttgggcgtaaaaagctgattttaatctcccgtgtgatggtgcttctctgtagctggccgtcattctggctgttggtgaattacccaagccctggcatgttgctgacggtggttttcgtgatggtcagctttaccacgcttggcggtgtgccagtgatgttgttgatctctgaactgttgccgaaacggattcgggcattaggtttcgcgctggtttatagcattggcgtagcaatctttggcggttttgcgcaatatttcgccacgcaatccatcgtgttgctggatagtctgacggctccggcgtggtatctggggggaggcacgttgctgtcgatgctggcgttgt

SEQ ID NO: 649 - DNA, 1164 bp, Escherichia coli
atgatcgaacactatattcgtgggtttgaggaagaacttcgcgagatccgccatcagatccacgaaaacccggagctgggattacaagaatttaaaaccagtgctttggttgcggaaaagctgcgccagtggggctatgaggttgagcaagggctggcgacaaccggcgtggtagccacgttaaaagtgggcgacggagagaaaagtattggcctgcgggcggatatggatgcgttgccgatttatgaaaatagtggcaagccctgggccagtaaacatcctggtttaatgcacgcctgcgggcatgacgggcataccaccatactgctgggggctgcgcgttattttgccgaaacccgccgttttaacggcacgttacgccttatcttccagcctgcggaagagatgattaacggcggtgagatcatggttaaagaggggctttttgatcgtttcccctgcgatgtcattttcgggatgcacaacatgccgggtttgccggtcggcaagtttttcttccagcctggggcgctgatggcgtcaatggatcagttccatattacggttcgtggttgtggcggacacggtgcgatcccgcacaaagccatcgatccagtgctggttgctgcacatatcaccaccgcattacaaagcattgtgtcgcgcaatgtcgatccgctggaagcggcggtaattaccgtcggcagcattgttgcgggtgaggcggctaacgtcattcctgacagtgctgagatgaaaatcagtgtccgctctcttagccgcgatacccgacaacttcttctgacccgtattcctgctcttgcacaagcccaggctgccagctttggcgctacggctgaggttacgcatgttaacggtacaccggtattagtaaatgacgaggagatggcgcgcttcgcctggcaggtggcgtgcaaaacatttggtgaagatcgggctgagtttggcatcaaacccctgatgggcagtgaagatttctctttcatgctggaagcccaacccaaaggcggtttcctgttattcggtaatggcgatgtcggggaaggttcctgcatggtgcataaccccggttacgactttaacgatgcaagcctggtcccggcaagcagctactggggcgcactggttgaagcctggctgcaa

SEQ ID NO: 650 - protein, 388 aa, Escherichia coli
MIEHYIRGFEEELREIRHQIHENPELGLQEFKTSALVAEKLRQWGYEVEQGLATTGVVATLKVGDGEKSIGLRADMDALPIYENSGKPWASKHPGLMHACGHDGHTTILLGAARYFAETRRFNGTLRLIFQPAEEMINGGEIMVKEGLFDRFPCDVIFGMHNMPGLPVGKFFFQPGALMASMDQFHITVRGCGGHGAIPHKAIDPVLVAAHITTALQSIVSRNVDPLEAAVITVGSIVAGEAANVIPDSAEMKISVRSLSRDTRQLLLTRIPALAQAQAASFGATAEVTHVNGTPVLVNDEEMARFAWQVACKTFGEDRAEFGIKPLMGSEDFSFMLEAQPKGGFLLFGNGDVGEGSCMVHNPGYDFNDASLVPASSYWGALVEAWLQ

SEQ ID NO: 651 - DNA, 1281 bp, Escherichia coli
atgacggcgatcgtaaatgaaaccgtgagtgtgaagaaaaagcccagcggcaggcgggtgatctttgcctcggcgtttggcaatgcgctcgaattttttgattttggcgtttacaacttttttgtggtctatatcagtacgcttttcttcccacccagtgccgatcataacgtcgcgctgttactggcatttgcaacgtttggtgtgagcttttttatgcgtccgctcggtgggattatcgttggtgcctgggccgatcgcttcgggcgtaaaccggcgatggtgttcactattgctctgatgagcctcggtacgctgatgatcggcatcgcaccgacgtatgaaacggcgggctattggggaaccgcaacgctggtgctggcgcgtctaattcagggtgttgcggcaggtggtgaagtcggggcttcaatgtcgctactggtggagtcagctccggcaaatcgtcgcggcttttacagcagttggtcactggcgacccaagggctggcaacgaccttcggtggggttgttgctttaggtctgagcgcatggctaccgttcgccacaggttcagaaaccgtaatggcagaatggggctggcgtgtgccgttttttattggcgtgttattagcacctatcggttgctggttgcgtctgagcctggaaaatgacgtacctgagccagtgcgcaataaaaaagctgctaccagcgaaagcgcgttttctctgctcctgcaacataaggcgactatcgttaatggcgttttactcgctattggtagcacggtcgcaacctatatctccctcttttattacggcacctgggcggcgaagtatctggcgatgcctcaacattattctcatgcagcgatgttactggcgggggtaattacgtttgtgggtgcgctgttggtggggatgctatgtgattcggttgggcgtaaaaagctgattttaatctcccgtgtgatggtgcttctctgtagctggccgtcattctggctgttggtgaattacccaagccctggcatgttgctgacggtggttttcgtgatggtcagctttaccacgcttggcggtgtgccagtgatgttgttgatctctgaactgttgccgaaacggattcgggcattaggtttcgcgctggtttatagcattggcgtagcaatctttggcggttttgcgcaatatttcgccacgcaatccatcgtgttgctggatagtctgacggctccggcgtggtatctggggggaggcacgttgctgtcgatgctggcgttg

SEQ ID NO: 652 - protein, 427 aa, Escherichia coli
MTAIVNETVSVKKKPSGRRVIFASAFGNALEFFDFGVYNFFVVYISTLFFPPSADHNVALLLAFATFGVSFFMRPLGGIIVGAWADRFGRKPAMVFTIALMSLGTLMIGIAPTYETAGYWGTATLVLARLIQGVAAGGEVGASMSLLVESAPANRRGFYSSWSLATQGLATTFGGVVALGLSAWLPFATGSETVMAEWGWRVPFFIGVLLAPIGCWLRLSLENDVPEPVRNKKAATSESAFSLLLQHKATIVNGVLLAIGSTVATYISLFYYGTWAAKYLAMPQHYSHAAMLLAGVITFVGALLVGMLCDSVGRKKLILISRVMVLLCSWPSFWLLVNYPSPGMLLTVVFVMVSFTTLGGVPVMLLISELLPKRIRALGFALVYSIGVAIFGGFAQYFATQSIVLLDSLTAPAWYLGGGTLLSMLAL

SEQ ID NO: 653 - DNA, 12102 bp, Escherichia coli
gcggttatagcgtcaccagcgccgctgatggcgcggtgttaaaacaggttaagcaagtgaaagtgggtgagacactgaccacacgactgggagatggtgtggtgattagtgaagtcagcgccgtaacaaaaacccgcaaatcacgtaaaaaaacgtctaatccgtagaccggataagaggcgccagcatcgcatccggcaataactcccaggctacgccagatccgccatgctggttactggaagcaggtcaccagacccggtttatttattagcgtgatactacaatcctgtgctccagtaccttcgtccatcccacactgttgagaggacaaataaggaaaactgggtgaagacggccatcccagtgaattaaaaacagtatgcaacaactctaattcattgtatgtcggtgcattttctatgctgccacactgccttgcgatatcccatttactggcatcaatgatatgtgcagaagcccagttttcgtagttaataatcggtgaggatacgggattagccccggacggcaattccgtcgttaacaacggtcgatgtagcgatttactattcaccactaccgtgtctgccatatgtccccaaaagtgcgccgaggaaacatttgggctggttggtaccgtaaaaatagcgtccagcgtgtctgtcgcggaagcgtaattagccagagtaaccgtcagtggcgttttataaccaggggtattatcctggcggagcgaaaaacttgccgtcccatccgcgcctgtcatgccactaatggtattaccgctttcactcagcgtaacagccgaacctgataacggctgaacgacgagatcgtccatcgccactacattgccatacaacgttgccccagcgttacgcggcgatgcctcaccacgtttcaaagtaaattcaacattcggcaccgtattcccggcgctgtctttcaccgtcacggtaacggacatggcttcgccttttttcactttcgccgcctgagtggctgcatcaaacgctgttgaggtaagtgtgacgctggaaaccgttgaacgcgcgttagccaggcaaggctgaaatgattttgttgaacccgtatacagcgtgccatttctcaaatcaaccgactggtctttaccatcggcggatttatcctctgcccaccaggtgtaatacgcaggccagccagtttcagtgacaaacgtgttattcggataacgcgcagacaacgaacttaaatcattgaatagtggctgccttgctacttcacaagggctcacactcgcatctgatttctgtgttggggtaaagtacggccagtcttcattattgttattgatcttgccgacgccagaagtcgatgtcagttcactccacaatttcgggcgttcaaataccgcaccattcactgccgtcaaggttgctggcatatgcccccagtagttagccttcgcagaatccgggctggtcactaccgtgaatatcaggtcctgattagccgtaacctgcggatttcgcgccaatgaagctgtaaacggcgttaccagaccaacggtgttattttgggtaacgttgaacgttatcgtgccatcactgccggtgaagccgctccatgccgacgtattctggttgaaggagatacgcgccgatgtcggggtgacttcatctaaaatgagatcatctacggtattggaggatacagagatccctgaacggcttttcgcctgcacgcgcttgagcgtaacaccttcgccgccaacaggattaccattggcatctttgatcgtcaccacgatgggaagcatctcaccttttttcacagatgacgtgggggtaccaccattgctggcagttcggccctcatcataggcagtcgatgacagcgtaaggcttgctggtgccgaatgtggctgcgtcagacagagcattaaagcgtatccattaatagtcgtcgtcgattgtcccgttttcaaattaatgacgccgtaataccacgtcaacgcgtcagtggtgctcatttcataagtccaccaatttccacttccggcagttataggcaaccccaaatctgtcagtattgtcccgcctggatgatcattatatagcccctgtaactcattgagacgcggctgatactcaaccgggcaatccggcgtaactttattggtataaaaaaggtatgaccacgactcattattattacttaccgaggaccccaaggtcgcttctgctgccagtagcggtcgtttaaaggtcacccccgccctactggtaaacgtgtcgggcatatgaccccagtattttgctttcggtgagttcggactggttatcacagtgaaaataacatccatcgtggcactttttgtggtgtcgcgcatcaatgttgcagtgagcggagttgccagcccataagtctcgttttgcgtcacatcaaaagtcgctttaccatcacttcctgtcgtcagaagtgcctgtgccccattattatagagtgacatgtttactccggcaggggtgaccggcacgatagtaagatcatcatacgtagaatctagcctgttttttgcacgatccaacgcagtcccgcgtatgagattaaagtttgcgcctggcaacagatttcctccgctatcccgcacaatcaccgtcatccggatcgccgtacctttcgccgccgttgcactagggcgaccatcgttgctggccgttttctccgcatccagtgccgtggaggtcatctctatagaagctgccactgcatgagggtttaccagacaggacacaaatgccacggtgtttgataatgccctggagcttgatccattcgataaattaatagactgatcgtaccagacgttcgcgtaggcaattttatcgtaagcccaccaggtgttagtcagcggaaggcctaaatcggtccctatcgcaccattaggatgttcactgtataactcttgaaattcgcttaataacggttgataaggttcgccgcagtctgatttgctgacatcattttttgctgccgtattcaaagaaagccatgattcattattagccatggttgactgccccgctggatgctcggcagtaagcaatggccgcttaaaggcaattcccgaccgggtagtaaacgtttcaggcatatgcccccagtaacttgccagtggcgtatccgggctggttatgacggtaaacatgaccggtaatttgttggattctatcgtcagctgatacaactgggcgtacatattggttaccaggcccatagaatcatcttgttttaccgtaaaggaggtagtcccgtccgcgccagtcaccccataaagcaggcttgaagaactattcatcctcgcagaagcgcctgccgcgttaattaccgtaatcgacttatttatcatctcggcattttgacggttcttcgagccttcacgtctgagaataaaggggacattgggcacgctatttccctgcgcatttttagtcaccacgcgaatcaccgcgtcttcgccttttttcactttcaacgcactcaaggtgtcgtcaactttgacaaattgcgccgtatcattcgcctcaacaatgatctgactggcaacggcgacaggcgtggtccggcagctcagtaatgcaccaccagatgagggcatctgcgtttcatctcctgtcttcagcgaaacgacatcatacgtaaaggtttgagtgaacgtatctgcaacggtattcgagatatagaacctcgacactggccagccaatagcatcatgtaatgcgctactcccctggtgcgcataaatggccctaagttcattgtcagttggaacatactccgcgccacaaccatttatcgaggtatcgttagcctggcccgacgggaacgtagaccaggcctccccctcttccaccagggtaccgatactggtggtagcactattctcgtccctcagcaaaggccttcgataaataagaccgtcatcgcctgtcgccgtttcagccatatgcccccagaatttggcttttggcgaatccgggctggtaagcaccgtaaagacaacgggaagcgtcgatttagtgctgctggaggaatccaacgctgccgtgagttctgtttttagcccggtagtctggtcttgcttcaatgtgaaagtggtggtgccatcagcccccgtcacgccataaataaccagggtcgttgaaagaaaatcattttgagtatttccccaggcatccgttaccgccagtgaagcaatcgacgtcgtagttgacacattggccctgttcacgctggtgtttcgtttgagggtaaatgcggtatttcccacaggcttaccctgcgcatctttagtggtcactcgtaatacggcttcttcaccctttttcactttgacaacattattcatacggtcaaattttgtgaggtctgcagcttcaagaacgatttggcttgccttaacaatcggcgtcgtctggcaggtaagcagttcttttgtggcagatggaattatcgaactggtgcctgaactgagattgacggccttgaagtcacgctgttccaggctactactacctgtcgtgctggaaaggtaacttgaggcgacgggccagccctgaaccgttttcatcgcatttccgcggttggcttcatacaatgactccagcccggcctgagagggaacatattcactaccacaaccattagaggatgtgcttatagcctgagcttgggtaaattgcgcccagtcttcattatcttccgcaatcgctgttcgacccgacgtactggataactctttcaacaataatgggcgtttaaagaccgctccatctgcagccgtcactgtttcaggcatatgcccccacattttcgccttatcgctgtccggactggttacaacggtaaaaatggtatcgagggtcgcttttttcgttgtatctgaatagagcctagcggtcagcgacgttttcgtgccatgggtatccgggcgggtaatagtgagaattttagttccgtcgctgccggtcatggcgctgtatgctgcagcggtattattaagcgaagtttcgtccgccaggccaccattgaccacaaccggcgcaaccagcgcatcactgctaccagcaacgtgtttttcctctgagcgggtataaccatcgccacgtttcagggtaaagggtatatcacccaatggattgccctgcgcatcttttaccgtcacctttacctgtagcgtttcgccttttttcagcttcgccgcatttgcagccgcgttccactgcgccggatctaccacttccagcgtaatgctgctggcaggattgttagccgtcgtcaggcaactgacataaaccgccgtgctaccgccaacggtccgcgccccatcgttgagggctatggtgtaataatgcggtacctgatctgcgggcgaactgctccagtagggctgacgctgcgttggccagccgtgtactgtctgtacaccgttaccgttattggcatcatagagcgcgctaagctgagaacggcgtgggagcatattggcgccacagccacctttactggtgctggaggcgttggcctggctgactcgcgaccagacttcgttattttccgttaatgtgccgtccggactgaacacttccgcagccagtcggggtcgggcaaaggttaaagcatcgacggtaatcgtctcatccatatgcccccacatctgcgcgccaaccgcatccggactggtgagcgtagtgaaaatcacattgtaattaacagtattgggaatataggagttcacaggcacaatatttagcggcgtcgataagcccacaccttgcgattgcttaatttccacagtcgcaaaaccctgcgcatccgtagtaccggcatagactaaagacggttgcgatgttccgtagagtgtgccattcatctcgattgcgccgcgggttggatcatcaaaacctgtagtctgcccctgacgatttttccccatatctttagtgatggtgaacgcggtatacggcacgggtgcattattcaaggcattaaaggtgcgtaccgtcatggtgatcgtgtcacccactttggcctgcgctctgctgcctgcggaaacatcacgatcggtggtcgcggcaatcttggcgaccatctcattgcccgaacaagagagatagttttgcttaaagccggaataggtgtcgatgttgcccgtggccaggtttaccgacgcgtgcgacgtctcttccaccgcactaagatacgctttttgcaacgttggccagccatattcggtgccgatggcattggctggatgagcggcaaacaaactgtgcaatgaactttggctcggaatatgacctaaaccacactcagcctgcatactgctattctgatcaaacagcgcccagtcttcgttattttcccgcaccgatcccagttcgttgtcggtttcatccgccagccgtgggcgtttaaagatattgttcgcttcaataatgcccaacatatggccccacatccgcgctttgtcggtatcggggctggtgatcaccgtaaaaataacgtctttctcatccgaggcagtaaaatcactgcgcattctcgcggtgatgtgagttttcacccccacgccgcctggctgggtcagcgtcagagtggcctctccgttagcatcagtgatcccttcataggtatgggcgtcaactttgcgaacgttactgccgccatcaatttgtaccggatgcgtctcccacgcggcgtcagtttgattcttacggttaatgccgtcatccagatgcagcgaaaagtagtagtaagccagcggctgatcgttgttcttgctatcggtaatcgtcagacgtaaagaagcctcttcccccacctttactttcatcgcttttatcgtcgaatcatagctgcccggcgtcagtaccagcttcggttcaacatcgggcgcttctttatcgacacagctcacaataaacgtcgtatcgtccggtttttgcgcttcgctgcggttcgaaacatccgccgcatggtgctggccgctcatccccgccagtgatgaccagtagaaattaccctgcatcggccaaccagccacatcctgcactgacgttggcaccaccgtcgccagcgcaccgaactgacgcattccgggcaaaatgtcgcaatgtttatccgcgccgctccaggtaaaggtggaccaggtttcattgtgatcgttaaccgtaccgccttcattatcgacttccgccgccagttttggtcgactaaaagtgtaatcacgggccttcagcgtatcgggcatatgaccccacattgtagcctgcggaacatccgggctggtgaggacggtaaagatcactgccgtttcactggcctgagcaatacccgcgaggctcgcgaccaacggcgtttttacaccagggccgttggcctgggtgaccgtaaccgtggcaacaccattcgcatcggtagtaccacgatattccgtcgcggtggtggttaattcggtcgtgcccagttttacaggcgcagtattgttcaccacaccctggcggttttcagcatctttgcgtttgataacaaaaggaatattccccacaacattaccgacgcaatctttggtggtgaccgttaacgtgatactgcccccaaccgtcattttcgccgcacctgaggattcgtcatagcccgcagcgctgacggaaataaggtcaccctgcgcgggcgcaatcttcagcgtcactttctgatcggcgagcgtcagaacactttcatagggatagcccgtcgaggtgagtaaatataacagcggcatggtctgctggggatcaggctgcgcccaggcgaccagcgaacgcccggcaagtccctgtgcacaaaacgagcgatctgcgactggctgtgggtccagtaaggtgtccggcgtggcggcatccgcccaaactaaagatacagccggtggcgtttggttttcccaacgtggggtggcaatgatatcgccttctctgtcttgcgggttggtgacgagcaatttagagacgctaacatccgcgttgaattcactcggtttagcggtaaacgctacctcatgcgtctttgtaggatccagaaagacactgccctggtagacgggtatgctggcgctgtcggcggtgggcacggtaccgttaaattcgccgaccgtatctgaagagtcttgccatgcagattctgcccatgaccacccaggcagcattgcgcttatcagcaatgcgcataacacaaggattttattcagggtcagggacatgacagaaactccaccggttgttaaacggacgcttgtcgcatcaacatattttgcttaatccgggattaagcaaaatatgcggaaacagcattcccttgcgggaatgctgctgagtacgcgttatttgtgtttgtaaataatgtgaagtttgtaaccctgtaccccgtcgccgttggtcgggatggaaagtgcctcttttccatcgcgcgcagggccgttaaggttggttctggcttcgtcgttggtcgcagggatgaccaaattgttattatcgaagcttgagttaacgatgccacccgaagtgccaagctgttggctgctgccagaaagtacccaacggaagtcataattggcggtgacgtcagcatcggtacccgcatcaaacttgccatttttgttctcatccgagtacagtttggccacgtaggttttgccaagttcgattggtgtgctaccgttgataaggttgatactggtaccatcaacaaagatggcgactttcaggttctggttaaccaccggccccggtgcaacgttatcgctgtcgcttccgccgccgctggcagtagaaacgtcataaagatgcagcgcagtcccgacgtttggcgtaccggtctgcgtggttggcgtaatttcaataccgatatagcgaccacggtcggcatcggtaagagtgtaactggtcaccttcgttgccagctcttttggatcccccccctgcgcatccttgtagctcatccagcggatagtatcgatagttttcgcgttatcgcccaatccaccaagatccacgtcgccttcggtatcaccaatttcccaacttacggttaatttatcacccgagtaaaaacgcttgtccgtttcatgccttgcgggcgagcgccttttagatcagaagtcaacgttacacggtcggcatctgtcgtagcacttcccccttccgaatagagccacggaatggtcccctggaaaatattggtttcaccgctgtcgacccaggcgctgtcttcagccagcgccacaggtgccacacaataacctgccagtgccagcgctaatgcgatccgggtcagaccgcgtcttttatcctgcttcattgatgctctccttaatgaaccttcagcgactggccgactggccttacgccaatcttattttttggtatacagcacgcgtaaaccgtatccctgcaagccatctcccgcttgtgcgccataggtttgcgccgcttcacggttagtggccggaatcacaatgtcctcattggagtgttcgcctgtgcacccacttaccattgatgctcttgccggtaaattcccacttgtagtcgtactgcaccatctcttcgtcagtcagtttttcgacctgctggaagacaccgtctttattgttgtcgcgccataaaacaaatcgataaatgttgttgacggcaacggttctttatctttacctatcaggttgctgggtttagccgcccccacacgatagataaaagcatttagcccaccaatttctgccccgaggaaagtgacatccacatagttactgtcatcgtagggcgcggcttttgctttccagcgataggtgccaggtaaggtactggagagggtgacagtgcccttttctttatcttgtttggcaataaaaacgcaggggttatcggtcgagcagggcttgttggttaacgtcactcgtttgtcctgcgcgtcgtaaagctgaggcgtaaggttatcttccggcaacgcatcgccgttgcggtcggtgttatcgccaaagctgtcggttacatcgagatccatcactacaccatcaacgccatctgcctgtgcgctggcttcgtggctgtggttgttctcttctggcaccgttcgcgatgttattaacaatcaactctattttacggtcctgctgaacggtgatttccaccacgccagagttctgtcggttgcccttttcatcttccagcgccagacgtactcgccaggtattgagtttttcttgttcggcttgatcggaactgtactgccaggcaggcagcaccaggttccagtggttattgttaccctctgtcagagtattctctttgataaccggcatcaccagcgtgcgggcggcattgtttttcgcctgccaggaggccgcaacgattttgtaatgatgattaatgagtgcgttaatggtccacttacatttttccagaccgacggccgcttcgggagtgtccttaatgacgcactcagggtgctcgttggtggcatccgctttcaaccacagggtgacatcaagcggatctttttctttgtattccagaacaataaagttattacgctcaacgaaatcaagacggctgcccatcagcgagtgcgccgctttcactttatcgctatccaattgatcttttagcggaacgccgaactgataattaagagtggcattaatgctgacatcactgttatctccggtccccgctttatagtccgtcccaactgtcagtaacggcactggttgataattcagtccaagcgttaccgcgtagggatctttctccaaattatccgtaccaaaaagggcgacttcatcgccgtaatattgctcgaagacaattttgccccccagttgcggataagaaggtaaccagacttcggcacgaatatcccaaccgcgcgcagggcgttcttcataaaagtcgaaatcttcagagtctttccagtcagaaagtgggtgataatagttgcctgagaattttaaataatccgtccaggcttcggcgcctaaacctaaacggcgatgtccacgggtaaagtcataatcataaaatatatttccacccaatagatatttatcaaaattataccttaccccaaggccaatattcccgatcgtacgatcttcttttcgttgcgcagaaaattggctgaaataaacagtggtttgattatcgtaccagggaacaaaataatcgatggaactgccatccagatcgccgccctgaccaatggagaggttcaaacggaccttaccgtagggagagagtgtgtcttcaatataagattgtgcggttgaggtgatttgactttgcagatagcttctggcctgagattccagcgcctcaggggtcaagttttcaaacccttgcgtggcggagttgatgacgtaatcggctccgcgctctttcagcgatttacccttgttggtttgttcatcctgttgtgctgcctggctacctaaatcaggtaacgattcgttttgcttaacatttatctctggcgccgcgaaagcagcaccagagataaatgttagaataatacagcgtttccatcgcagcatgcactttccctgtgacaatgatacagtcaaaaataagctttaatattgtatccctgattattcagaaaggcatgtcataaagagtaaatatattcttaattatttaaattagtgatttcactcaaatacattagttattccactaataacagattgtttatcattcatatattaaatataaatgataaaacaatacattcacatgatattaagcaataataaattcaacgcgttttttagatattaaaccgtgcccatgttggcagaaataatccacagcaccacaagcttttaacacttgtaacgcctgatgacactcagggcaaagtgcctggacggtaaagtctttgtcgcaagttgcacagtgagcagtctcgccattgcgttcgagaggggttttgcaggttggacagttgagtgccataaatactcctcgcgtgttattcggcttccctctccgtgtggaaagggaaaccagataagtgatt

SEQ ID NO: 654 - DNA, 5745 bp, Escherichia coli
atgtccctgaccctgaataaaatccttgtgttatgcgcattgctgataagcgcaatgctgcctgggtggtcatgggcagaatctgcatggcaagactcttcagatacggtcggcgaatttaacggtaccgtgcccaccgccgacagcgccagcatacccgtctaccagggcagtgtctttctggatcctacaaagacgcatgaggtagcgtttaccgctaaaccgagtgaattcaacgcggatgttagcgtctctaaattgctcgtcaccaacccgcaagacagagaaggcgatatcattgccaccccacgttgggaaaaccaaacgccaccggctgtatctttagtttgggcggatgccgccacgccggacaccttactggacccacagccagtcgcagatcgctcgttttgtgcacagggacttgccgggcgttcgctggtcgcctgggcgcagcctgatccccagcagaccatgccgctgttatatttactcacctcgacgggctatccctatgaaagtgttctgacgctcgccgatcagaaagtgacgctgaagattgcgcccgcgcagggtgaccttatttccgtcagcgctgcgggctatgacgaatcctcaggtgcggcgaaaatgacggttgggggcagtatcacgttaacggtcaccaccaaagattgcgtcggtaatgttgtggggaatattccttttgttatcaaacgcaaagatgctgaaaaccgccagggtgtggtgaacaatactgcgcctgtaaaactgggcacgaccgaattaaccaccaccgcgacggaatatcgtggtactaccgatgcgaatggtgttgccacggttacggtcacccaggccaacggccctggtgtaaaaacgccgttggtcgcgagcctcgcgggtattgctcaggccagtgaaacggcagtgatctttaccgtcctcaccagcccggatgttccgcaggctacaatgtggggtcatatgcccgatacgctgaaggcccgtgattacacttttagtcgaccaaaactggcggcggaagtcgataatgaaggcggtacggttaacgatcacaatgaaacctggtccacctttacctggagcggcgcggataaacattgcgacattttgcccggaatgcgtcagttcggtgcgctggcgacggtggtgccaacgtcagtgcaggatgtggctggttggccgatgcagggtaatttctactggtcatcactggcggggatgagcggccagcaccatgcggcggatgtttcgaaccgcagcgaagcgcaaaaaccggacgatacgacgtttattgtgagctgtgtcgataaagaagcgcccgatgttgaaccgaagctggtactgacgccgggcagctatgattcgacgataaaagcgatgaaagtaaaggtgggggaagaggcttctttacgtctgacgattaccgatagcaagaacaacgatcagccgctggcttactactacttttcgctgcatctggatgacggcattaaccgtaagaatcaaactgacgccgcgtgggagacgcatccggtacaaattgatggcggcagtaacgttcgcaaagttgacgcccatacctatgaagggatcactgatgctaacggagaggccactctgacgctgacccagccaggcggcgtgggggtgaaaactcacatcaccgcgagaatgcgcagtgattttactgcctcggatgagaaagacgttatttttacggtgatcaccagccccgataccgacaaagcgcggatgtggggccatatgttgggcattattgaagcgaacaatatctttaaacgcccacggctggcggatgaaaccgacaacgaactgggatcggtgcgggaaaataacgaagactgggcgctgtttgatcagaatagcagtatgcaggctgagtgtggtttaggtcatattccgagccaaagttcattgcacagtttgtttgccgctcatccagccaatgccatcggcaccgaatatggctggccaacgttgcaaaaagcgtatcttagtgcggtggaagagacgtcgcacgcgtcggtaaacctggccacgggcaacatcgacacctattccggctttaagcaaaactatctctcttgttcgggcaatgagatggtcgccaagattgccgcgaccaccgatcgtgatgtttccgcaggcagcagagcgcaggccaaagtgggtgacacgatcaccatgacggtacgcacctttaatgccttgaataatgcacccgtgccgtataccgcgttcaccatcactaaagatatggggaaaaatcgtcaggggcagactacaggttttgatgatccaacccgcggcgcaatcgagatgaatggcacactctacggaacatcgcaaccgtctttagtctatgccggtactacggatgcgcagggttttgcgactgtggaaattaagcaatcgcaaggtgtgggcttatcgacgccgctaaatattgtgcctgtgaactcctatattcccaatactgttaattacaatgtgattttcactacgctcaccagtccggatgcggttggcgcgcagatgtgggggcatatggatgagacgattaccgtcgatgctttaacctttgcccgaccccgactggctgcggaagtgttcagtccggacggcacattaacggaaaataacgaagtctggtcgcgagtcagccaggccaacgcctccagcaccagtaaaggtggctgtggcgccaatatgctcccacgccgttctcagcttagcgcgctctatgatgccaataacggtaacggtgtacagacagtacacggctggccaacgcagcgtcagccctactggagcagttcgcccgcagatcaggtaccgcattattacaccatagccctcaacgatggggcgcggaccgttggcggtagcacggcggtttatgtcagttgcctgacgacggctaacaatcctgccagcagcattacgctggaagtggtagatccggcgcagtggaacgcggctgcaaatgcggcgaagctgaaaaaaggcgaaacgctacaggtaaaggtgacggtaaaagatgcgcagggcaatccattgggtgatataccctttaccctgaaacgtggcgatggttatacccgctcagaggaaaaacacgttgctggtagcagtgatgcgctggttgcgccggttgtggtcaatggtggcctggcggacgaaacttcgcttaataataccgctgcagcatacagcgccatgaccggcagcgacggaactaaaattctcactattacccgcccggatacccatggcacgaaaacgtcgctgaccgctaggctctattcagatacaacgaaaaaagcgaccctcgataccatttttaccgttgtaaccagtccggacagcgataaggcgaaaatgtgggggcatatgcctgaaacagtgacggctgcagatggagcggtctttaaacgcccattattgttgaaagagttatccagtacgtcgggtcgaacagcgattgcggaagataatgaagactgggcgcaatttacccaagctcaggctataagcacatcctctaatggttgtggtagtgaatatgttccctctcaggccgggctggagtcattgtatgaagccaaccgcggaaatgcgatgaaaacggttcagggctggcccgtcgcctcaagttacctttccagcacgacaggtagtagtagcctggaacagcgtgacttcaaggccgtcaatctcagttcaggcaccagttcgataattccatctgccacaaaagaactgcttacctgccagacgacgccgattgttaaggcaagccaaatcgttcttgaagctgcagacctcacaaaatttgaccgtatgaataatgttgtcaaagtgaaaaagggtgaagaagccgtattacgagtgaccactaaagatgcgcagggtaagcctgtgggaaataccgcatttaccctcaaacgaaacaccagcgtgaacagggccaatgtgtcaactacgacgtcgattgcttcactggcggtaacggatgcctggggaaatactcaaaatgattttctttcaacgaccctggttatttatggcgtgacgggggctgatggcaccaccactttcacattgaagcaagaccagactaccgggctaaaaacagaactcacggcagcgttggattcctccagcagcactaaatcgacgcttcccgttgtctttacggtgcttaccagcccggattcgccaaaagccaaattctgggggcatatggctgaaacggcgacaggcgatgacggtcttatttatcgaaggcctttgctgagggacgagaatagtgctaccaccagtatcggtaccctggtggaagagggggaggcctggtctacgttcccgtcgggccaggctaacgatacctcgataaatggttgtggcgcggagtatgttccaactgacaatgaacttagggccatttatgcgcaccaggggagtagcgcattacatgatgctattggctggccagtgtcgaggttctatatctcgaataccgttgcagatacgttcactcaaacctttacgtatgatgtcgtttcgctgaagacaggagatgaaacgcagatgccctcatctggtggtgcattactgagctgccggaccacgcctgtcgccgttgccagtcagatcattgttgaggcgaatgatacggcgcaatttgtcaaagttgacgacaccttgagtgcgttgaaagtgaaaaaaggcgaagacgcggtgattcgcgtggtgactaaaaatgcgcagggaaatagcgtgcccaatgtcccctttattctcagacgtgaaggctcgaagaaccgtcaaaatgccgagatgataaataagtcgattacggtaattaacgcggcaggcgcttctgcgaggatgaatagttcttcaagcctgctttatggggtgactggcgcggacgggactacctcctttacggtaaaacaagatgattctatgggcctggtaaccaatatgtacgcccagttgtatcagctgacgatagaatccaacaaattaccggtcatgtttaccgtcataaccagcccggatacgccactggcaagttactgggggcatatgcctgaaacgtttactacccggtcgggaattgcctttaagcggccattgcttactgccgagcatccagcggggcagtcaaccatggctaataatgaatcatggctttctttgaatacggcagcaaaaaatgatgtcagcaaatcagactgcggcgaaccttatcaaccgttattaagcgaatttcaagagttatacagtgaacatcctaatggtgcgatagggaccgatttaggccttccgctgactaacacctggtgggcttacgataaaattgcctacgcgaacgtctggtacgatcagtctattaatttatcgaatggatcaagctccagggcattatcaaacaccgtggcatttgtgtcctgtctggtaaaccctcatgcagtggcagcttctatagagatgacctccacggcactggatgcggagaaaacggccagcaacgatggtcgccctagtgcaacggcggcgaaaggtacggcgatccggatgacggtgattgtgcgggatagcggaggaaatctgttgccaggcgcaaactttaatctcatacgcgggactgcgttggatcgtgcaaaaaacaggctagattctacg

SEQ ID NO: 655 - protein, 1915 aa, Escherichia coli
MSLTLNKILVLCALLISAMLPGWSWAESAWQDSSDTVGEFNGTVPTADSASIPVYQGSVFLDPTKTHEVAFTAKPSEFNADVSVSKLLVTNPQDREGDIIATPRWENQTPPAVSLVWADAATPDTLLDPQPVADRSFCAQGLAGRSLVAWAQPDPQQTMPLLYLLTSTGYPYESVLTLADQKVTLKIAPAQGDLISVSAAGYDESSGAAKMTVGGSITLTVTTKDCVGNVVGNIPFVIKRKDAENRQGVVNNTAPVKLGTTELTTTATEYRGTTDANGVATVTVTQANGPGVKTPLVASLAGIAQASETAVIFTVLTSPDVPQATMWGHMPDTLKARDYTFSRPKLAAEVDNEGGTVNDHNETWSTFTWSGADKHCDILPGMRQFGALATVVPTSVQDVAGWPMQGNFYWSSLAGMSGQHHAADVSNRSEAQKPDDTTFIVSCVDKEAPDVEPKLVLTPGSYDSTIKAMKVKVGEEASLRLTITDSKNNDQPLAYYYFSLHLDDGINRKNQTDAAWETHPVQIDGGSNVRKVDAHTYEGITDANGEATLTLTQPGGVGVKTHITARMRSDFTASDEKDVIFTVITSPDTDKARMWGHMLGIIEANNIFKRPRLADETDNELGSVRENNEDWALFDQNSSMQAECGLGHIPSQSSLHSLFAAHPANAIGTEYGWPTLQKAYLSAVEETSHASVNLATGNIDTYSGFKQNYLSCSGNEMVAKIAATTDRDVSAGSRAQAKVGDTITMTVRTFNALNNAPVPYTAFTITKDMGKNRQGQTTGFDDPTRGAIEMNGTLYGTSQPSLVYAGTTDAQGFATVEIKQSQGVGLSTPLNIVPVNSYIPNTVNYNVIFTTLTSPDAVGAQMWGHMDETITVDALTFARPRLAAEVFSPDGTLTENNEVWSRVSQANASSTSKGGCGANMLPRRSQLSALYDANNGNGVQTVHGWPTQRQPYWSSSPADQVPHYYTIALNDGARTVGGSTAVYVSCLTTANNPASSITLEVVDPAQWNAAANAAKLKKGETLQVKVTVKDAQGNPLGDIPFTLKRGDGYTRSEEKHVAGSSDALVAPVVVNGGLADETSLNNTAAAYSAMTGSDGTKILTITRPDTHGTKTSLTARLYSDTTKKATLDTIFTVVTSPDSDKAKMWGHMPETVTAADGAVFKRPLLLKELSSTSGRTAIAEDNEDWAQFTQAQAISTSSNGCGSEYVPSQAGLESLYEANRGNAMKTVQGWPVASSYLSSTTGSSSLEQRDFKAVNLSSGTSSIIPSATKELLTCQTTPIVKASQIVLEAADLTKFDRMNNVVKVKKGEEAVLRVTTKDAQGKPVGNTAFTLKRNTSVNRANVSTTTSIASLAVTDAWGNTQNDFLSTTLVIYGVTGADGTTTFTLKQDQTTGLKTELTAALDSSSSTKSTLPVVFTVLTSPDSPKAKFWGHMAETATGDDGLIYRRPLLRDENSATTSIGTLVEEGEAWSTFPSGQANDTSINGCGAEYVPTDNELRAIYAHQGSSALHDAIGWPVSRFYISNTVADTFTQTFTYDVVSLKTGDETQMPSSGGALLSCRTTPVAVASQIIVEANDTAQFVKVDDTLSALKVKKGEDAVIRVVTKNAQGNSVPNVPFILRREGSKNRQNAEMINKSITVINAAGASARMNSSSSLLYGVTGADGTTSFTVKQDDSMGLVTNMYAQLYQLTIESNKLPVMFTVITSPDTPLASYWGHMPETFTTRSGIAFKRPLLTAEHPAGQSTMANNESWLSLNTAAKNDVSKSDCGEPYQPLLSEFQELYSEHPNGAIGTDLGLPLTNTWWAYDKIAYANVWYDQSINLSNGSSSRALSNTVAFVSCLVNPHAVAASIEMTSTALDAEKTASNDGRPSATAAKGTAIRMTVIVRDSGGNLLPGANFNLIRGTALDRAKNRLDST

SEQ ID NO: 656 - DNA, 1434 bp, Escherichia coli
atgtcactctataataatggggcacaggcacttctgacgacaggaagtgatggtaaagcgacttttgatgtgacgcaaaacgagacttatgggctggcaactccgctcactgcaacattgatgcgcgacaccacaaaaagtgccacgatggatgttattttcactgtgataaccagtccgaactcaccgaaagcaaaatactggggtcatatgcccgacacgtttaccagtagggcgggggtgacctttaaacgaccgctactggcagcagaagcgaccttggggtcctcggtaagtaataataatgagtcgtggtcataccttttttataccaataaagttacgccggattgcccggttgagtatcagccgcgtctcaatgagttacaggggctatataatgatcatccaggcgggacaatactgacagatttggggttgcctataactgccggaagtggaaattggtggacttatgaaatgagcaccactgacgcgttgacgtggtattacggcgtcattaatttgaaaacgggacaatcgacgacgactattaatggatacgctttaatgctctgtctgacgcagccacattcggcaccagcaagccttacgctgtcatcgactgcctatgatgagggccgaactgccagcaatggtggtacccccacgtcatctgtgaaaaaaggtgagatgcttcccatcgtggtgacgatcaaagatgccaatggtaatcctgttggcggcgaaggtgttacgctcaagcgcgtgcaggcgaaaagccgttcagggatctctgtatcctccaataccgtagatgatctcattttagatgaagtcaccccgacatcggcgcgtatctccttcaaccagaatacgtcggcatggagcggcttcaccggcagtgatggcacgataacgttcaacgttacccaaaataacaccgttggtctggtaacgccgtttacagcttcattggcgcgaaatccgcaggttacggctaatcaggacctgatattcacggtagtgaccagcccggattctgcgaaggctaactactgggggcatatgccagcaaccttgacggcagtgaatggtgcggtatttgaacgcccgaaattgtggagtgaactgacatcgacttctggcgtcggcaagatcaataacaataatgaagactggccgtactttaccccaacacagaaatcagatgcgagtgtgagcccttgtgaagtagcaaggcagccactattcaatgatttaagttcgttgtctgcgcgttatccgaataacacgtttgtcactgaaactggctggcctgcgtattacacctggtgggcagaggataaatccgccgatggtaaagaccagtcggttgatttgagaaatggcacgctgtatacgggttcaacaaaatcatttcagccttgcctg

SEQ ID NO: 657 - protein, 478 aa, Escherichia coli
MSLYNNGAQALLTTGSDGKATFDVTQNETYGLATPLTATLMRDTTKSATMDVIFTVITSPNSPKAKYWGHMPDTFTSRAGVTFKRPLLAAEATLGSSVSNNNESWSYLFYTNKVTPDCPVEYQPRLNELQGLYNDHPGGTILTDLGLPITAGSGNWWTYEMSTTDALTWYYGVINLKTGQSTTTINGYALMLCLTQPHSAPASLTLSSTAYDEGRTASNGGTPTSSVKKGEMLPIVVTIKDANGNPVGGEGVTLKRVQAKSRSGISVSSNTVDDLILDEVTPTSARISFNQNTSAWSGFTGSDGTITFNVTQNNTVGLVTPFTASLARNPQVTANQDLIFTVVTSPDSAKANYWGHMPATLTAVNGAVFERPKLWSELTSTSGVGKINNNNEDWPYFTPTQKSDASVSPCEVARQPLFNDLSSLSARYPNNTFVTETGWPAYYTWWAEDKSADGKDQSVDLRNGTLYTGSTKSFQPCL

SEQ ID NO: 658 - DNA, 957 bp, Escherichia coli
atgaagcaggataaaagacgcggtctgacccggatcgcattagcgctggcactggcaggttattgtgtggcacctgtggcgctggctgaagacagcgcctgggtcgacagcggtgaaaccaatattttccaggggaccattccgtggctctattcggaagggggaagtgctacgacagatgccgaccgtgtaacgttgacttctgatctaaaaggcgctcgcccgcaaggcatgaaacggacaagcgtttttactcgggtgataaatattggtgataccgaaggcgacgtggatcttggtggattgggcgataacgcgaaaactatcgatactatccgctggatgagctacaaggatgcgcaggggggggatccaaaagagctggcaacgaaggtgaccagttacactcttaccgatgccgaccgtggtcgctatatcggtattgaaattacgccaaccacgcagaccggtacgccaaacgtcgggactgcgctgcatctttatgacgtttctactgccagcggcggcggaagcgacagcgataacgttgcaccggggccggtggttaaccagaacctgaaagtcgccatctttgttgatggtaccagtatcaaccttatcaacggtagcacaccaatcgaacttggcaaaacctacgtggccaaactgtactcggatgagaacaaaaatggcaagtttgatgcgggtaccgatgctgacgtcaccgccaattatgacttccgttgggtactttctggcagcagccaacagcttggcacttcgggtggcatcgttaactcaagcttcgataataacaatttggtcatccctgcgaccaacgacgaagccagaaccaaccttaacggccctgcgcgcgatggaaaagaggcactttccatcccgaccaacggcgacggggtacagggttacaaacttcacattatttacaaacacaaa

SEQ ID NO: 659 - protein, 319 aa, Escherichia coli
MKQDKRRGLTRIALALALAGYCVAPVALAEDSAWVDSGETNIFQGTIPWLYSEGGSATTDADRVTLTSDLKGARPQGMKRTSVFTRVINIGDTEGDVDLGGLGDNAKTIDTIRWMSYKDAQGGDPKELATKVTSYTLTDADRGRYIGIEITPTTQTGTPNVGTALHLYDVSTASGGGSDSDNVAPGPVVNQNLKVAIFVDGTSINLINGSTPIELGKTYVAKLYSDENKNGKFDAGTDADVTANYDFRWVLSGSSQQLGTSGGIVNSSFDNNNLVIPATNDEARTNLNGPARDGKEALSIPTNGDGVQGYKLHIIYKHK

SEQ ID NO: 660 - DNA, 2166 bp, Escherichia coli
atgctgcgatggaaacgctgtattattctaacatttatctctggtgctgctttcgcggcgccagagataaatgttaagcaaaacgaatcgttacctgatttaggtagccaggcagcacaacaggatgaacaaaccaacaagggtaaatcgctgaaagagcgcggagccgattacgtcatcaactccgccacgcaagggtttgaaaacttgacccctgaggcgctggaatctcaggccagaagctatctgcaaagtcaaatcacctcaaccgcacaatcttatattgaagacacactctctccctacggtaaggtccgtttgaacctctccattggtcagggcggcgatctggatggcagttccatcgattattttgttccctggtacgataatcaaaccactgtttatttcagccaattttctgcgcaacgaaaagaagatcgtacgatcgggaatattggccttggggtaaggtataattttgataaatatctattgggtggaaatatattttatgattatgactttacccgtggacatcgccgtttaggtttaggcgccgaagcctggacggattatttaaaattctcaggcaactattatcacccactttctgactggaaagactctgaagatttcgacttttatgaagaacgccctgcgcgcggttgggatattcgtgccgaagtctggttaccttcttatccgcaactggggggcaaaattgtcttcgagcaatattacggcgatgaagtcgccctttttggtacggataatttggagaaagatccctacgcggtaacgcttggactgaattatcaaccagtgccgttactgacagttgggacggactataaagcggggaccggagataacagtgatgtcagcattaatgccactcttaattatcagttcggcgttccgctaaaagatcaattggatagcgataaagtgaaagcggcgcactcgctgatgggcagccgtcttgatttcgttgagcgtaataactttattgttctggaatacaaagaaaaagatccgcttgatgtcaccctgtggttgaaagcggatgccaccaacgagcaccctgagtgcgtcattaaggacactcccgaagcggccgtcggtctggaaaaatgtaagtggaccattaacgcactcattaatcatcattacaaaatcgttgcggcctcctggcaggcgaaaaacaatgccgcccgcacgctggtgatgccggttatcaaagagaatactctgacagagggtaacaataaccactggaacctggtgctgcctgcctggcagtacagttccgatcaagccgaacaagaaaaactcaatacctggcgagtacgtctggcgctggaagatgaaaagggcaaccgacagaactctggcgtggtggaaatcaccgttcagcaggaccgtaaaatagagttgattgttaataacatcgcgaacccagaagagaacaaccacagccacgaagccagcgcacaggcagatggcgttgatggtgtagtgatggatctcgatgtaaccgacagctttggcgataacaccgaccgcaacggcgatgcgttgccggaagataaccttacgcctcagctttacgacgcgcaggacaaacgagtgacgttaaccaacaagccctgctcgaccgataacccctgcgtttttattgccaaacaagataaagaaaagggcactgtcaccctctccagtaccttacctggcacctatcgctggaaagcaaaagccgcgccctacgatgacagtaactatgtggatgtcactttcctcggggcagaaattggtgggctaaatgcttttatctatcgtgtgggggcggctaaacccagcaacctgataggtaaagataaagaaccgttgccgtcaacaacatttatcgatttgttttatggcgcgacaacaataaagacggtgtcttccagcaggtcgaaaaacctgacgaagagatggtgcagtacgactacaagtgggaatttaccggcaagagcatcaatggtaagtgggtgcacaggcgaacactccaatgaggacattgtgattccggccactaaccgtgaagcggcgcaaacctatggcgcacaagcgggagatggcttgcagggatacggtttacgcgtgctgtataccaaaaaa

SEQ ID NO: 661 - protein, 722 aa, Escherichia coli
MLRWKRCIILTFISGAAFAAPEINVKQNESLPDLGSQAAQQDEQTNKGKSLKERGADYVINSATQGFENLTPEALESQARSYLQSQITSTAQSYIEDTLSPYGKVRLNLSIGQGGDLDGSSIDYFVPWYDNQTTVYFSQFSAQRKEDRTIGNIGLGVRYNFDKYLLGGNIFYDYDFTRGHRRLGLGAEAWTDYLKFSGNYYHPLSDWKDSEDFDFYEERPARGWDIRAEVWLPSYPQLGGKIVFEQYYGDEVALFGTDNLEKDPYAVTLGLNYQPVPLLTVGTDYKAGTGDNSDVSINATLNYQFGVPLKDQLDSDKVKAAHSLMGSRLDFVERNNFIVLEYKEKDPLDVTLWLKADATNEHPECVIKDTPEAAVGLEKCKWTINALINHHYKIVAASWQAKNNAARTLVMPVIKENTLTEGNNNHWNLVLPAWQYSSDQAEQEKLNTWRVRLALEDEKGNRQNSGVVEITVQQDRKIELIVNNIANPEENNHSHEASAQADGVDGVVMDLDVTDSFGDNTDRNGDALPEDNLTPQLYDAQDKRVTLTNKPCSTDNPCVFIAKQDKEKGTVTLSSTLPGTYRWKAKAAPYDDSNYVDVTFLGAEIGGLNAFIYRVGAAKPSNLIGKDKEPLPSTTFIDLFYGATTIKTVSSSRSKNLTKRWCSTTTSGNLPARASMVSGCTGEHSNEDIVIPATNREAAQTYGAQAGDGLQGYGLRVLYTKK

SEQ ID NO: 662 - DNA, 1248 bp, Escherichia coli
gcaaaaataacaaaatattgaataacaacaacatgaaataagcttttaaaaagtcaattataaatctgttaagtaaactacaaaatcaacaaattattcatcactatatttgtgatacacatctctattttcttattgaatgctcgaaaacatacttattacgtttattattttttcgctcatcccctttataaattctgaattatcggctgttgtctgttttctcatcacctcatgtgacatattccccactttactcaaggaagattcatatgaaagcacctgtttcattaacctcatttcgcccacaaaaatctcttgctatcgccattggcgtgcttgccgtggttgtgctgccatttctctcgtattacaccgttaatgaaggtgaacgcggcattttgctgcgctacggaaaaatcgtaaaagttgccgagccggggctgggttttaagatcccttttatggaaagcgtagagaaaatttccacgcgtaatcaggctgtggtctatcagggattacaggcctacagccgcgaccagcaaccggcacaaatgacagtatcagtcagcttccacattaaaccttcagaagcaggcgcggtttataccacctacaacaccattgaagcattaaaagatcgtctgattgtccgtcagttgccaactcaactggagaacgttttcggacaatataccgccatcagcgccgtacaggatcgtacaaaactggttcaggatctgcaaaatgccatgcgcaaagccgttgttgggccagtggtaattgacggggtccagattgaaaatattgatttttctgacgcttatgaaaagtcgattgaagaccgaatgaaagcagaagtcgccattgcccccttagcaaaatctggaaacgagaaaatcaagcgcaatgcggtactaggcccaggcggaagcagacagtaaactagcggcagccaaagcagaagcggaaactattcgcgtaagaggcgcggcagaggctgaaactattcgtttaaaaagtgcggctgaagcagaagctatccgcctgcgcgggaagctctgcgggagaatcccgggacttgttgccctcaccactgctgagcgttgggactggtaaactgcccgataccatgatccccaggcagcacagttccgtttatctctactaagtaaaaaagggccgctttcgcggcccttgagactgatagcaaagacaaaactgcctgatgcgctacgcttatcaggc

SEQ ID NO: 663 - DNA, 669 bp, Escherichia coli
atgaaagcacctgtttcattaacctcatttcgcccacaaaaatctcttgctatcgccattggcgtgcttgccgtggttgtgctgccatttctctcgtattacaccgttaatgaaggtgaacgcggcattttgctgcgctacggaaaaatcgtaaaagttgccgagccggggctgggttttaagatcccttttatggaaagcgtagagaaaatttccacgcgtaatcaggctgtggtctatcagggattacaggcctacagccgcgaccagcaaccggcacaaatgacagtatcagtcagcttccacattaaaccttcagaagcaggcgcggtttataccacctacaacaccattgaagcattaaaagatcgtctgattgtccgtcagttgccaactcaactggagaacgttttcggacaatataccgccatcagcgccgtacaggatcgtacaaaactggttcaggatctgcaaaatgccatgcgcaaagccgttgttgggccagtggtaattgacggggtccagattgaaaatattgatttttctgacgcttatgaaaagtcgattgaagaccgaatgaaagcagaagtcgccattgcccccttagcaaaatctggaaacgagaaaatcaagcgcaatgcggtactaggcccaggcggaagcagacag

SEQ ID NO: 664 - protein, 223 aa, Escherichia coli
MKAPVSLTSFRPQKSLAIAIGVLAVVVLPFLSYYTVNEGERGILLRYGKIVKVAEPGLGFKIPFMESVEKISTRNQAVVYQGLQAYSRDQQPAQMTVSVSFHIKPSEAGAVYTTYNTIEALKDRLIVRQLPTQLENVFGQYTAISAVQDRTKLVQDLQNAMRKAVVGPVVIDGVQIENIDFSDAYEKSIEDRMKAEVAIAPLAKSGNEKIKRNAVLGPGGSRQ

SEQ ID NO: 665 - DNA, 3128 bp, Escherichia coli
tcatataaacggacctccacggaggtccgtttttcgtttcagaacgccacaatttaagcgttctgcctccaaatcaattctaccgaactcaaccagattccccccacatcaaccccattgtgtgggtataattgcgggtataccccagttcgacagaatttgtaccctctttaacgcattcagaaggctgaactatggcactgactgacgcaaaaatccgggctgcaaagcccactgacaaggcttataaactcactgacggggctggcatgttcctgctggtacatcctaatggttcccgttactggcgtctccgttatcgtattctgggtaaggagaaaaccctggcacttggtgtgtatccggaagtttctctctccgaagctcgtacaaaacgggatgaggcccgaaaactgatttcggagggggttgacccttgcgaacagaaaagagctaaaaaagtagtccctgatttacagctctcttttgaacatatttgcacgacgctggcatgccagtaattaaacaatgggcaccattcacacgataaagtactcaaaagcctcgagactcacgttttcccctttatcggcaaccgggatatcacaacactcagtaccccggatctgcttatccctgttcgtgctgcagaagttaaacaaatttatgaaatcgccagtcgtctgcagcaaagaatatctgctgtaatgcgttatgccgtacagtctggcatcatcagatataacccggctctggatatggctggtgcattgaccacggtaaaacgccagcatcgccccgctcttgatctttcacgtctgcctgaacttctgtcgcgtattaacagttataaaggtcagcctgtcacccggcttgctgttatgctgaattactggtttttattcgctccagtgaactcagatatgcccgctggtctgaaattgatattgacaatgccatgtggactattccagccgaacgcaaacctctgccaggcgtaaaattctcacaccggggctccaagatgcgaacaccacatcttgtgccactcagccaacaggctgtagccatactggcagaacttcagacatgggcaggtgaaaatggtctgatctttacgggagcacacgacccacgtaaaccaatcagtgaaaataccgtaaataaggccctcagagtgatggggtatgacacaaccaaggaagtctgtggccatggattccgggcgatggcgtgcagtgcattgattgaatccggcttatggtcaagagatgcggttgaacgtcagatgagtcatcaggagcgcaacggagtacgtgccgcgtatattcataaagcagaacatctggaagaacgtcggcttatgctgcaatggtgggcagattttctggatgcaaacagggaggagtgtatcagtccgtttgaatatgcaaaagttaacaatccactgaaaaggtgactgaacgccatttacacacatgctcttcctcttaaggggaagagcacccgcctcaatcaatttcttttttatgccggcggaaccatcagccaggctgaggttctcattcaataactcaacgtcttaccacagaacagaattcactgtattatcatgggcaacgttaatcccggacaataaaaggacaccgatgccaggcatcacaatttttatagcctgcaggttatggtccatccttttttacaggttcagaatatgactggcaaattacgctttgaagtgaacgataaccagggctgtttcatatttccggaaacctggtttggctcgttgctggatgagtttgaagaactgattgatgcatacgatgcggatgaaatcagcgaaacaagttacatcaacaaactcaggcgccttgcccgacaggagaatgactttattgatgtacacgcttacctggcatacgtatttctggagcagaatgccccgcgtaaggcgctgaatgcagcccttaaagggctggcagttggcaatcgtcttatccctgaaggtttcagtggcagaatcatctggatacatcctgacaaccgaccttttcttcgtgccctctatgcggcaatcctggcaaatgcacatttacagcgtcatcaggatgccatcatgctcattgaaaaaatactggattacaatcccgaagataatcatggtgcacgctggctactgggaccggaactgttacgcactggcgctcatgaacaggcacgccatatactgcaggaacatgcagatgaattttcaccttactggtatgaactcggccttctgcattttcttaatggggaactggtaaaagctgcaactgcatttcgtcgcggctttgcggcaaatacttacatcgcagaaatactgtgcggaaatctgcatccatttccacttgctgtatggcataacttttcaggcggtccggatactgccgaagattattatgccacataccacccgttatgggggcaatatccggaagcattgctgtttgtaaactggctctataatcattcctctgtgctgcatgaacgggcagaaatcattaaatgcgccgaaatgctgatgcaggaagatgatttcgaaatatgcgaaagtattttaagacagcaggagaagttgcgtgaaagaattgatgagacgctttctgagaaaattgtacagaaatgcagaaatatgaatggtgaatatgtctggccctggatattgccgttttcagcggcaggcatgaaacatactggcatacagtatcagtagatattgcattagtgtatcctgcacacaagtaataatttatccaccaataataacactgttaatgcccccttcccctggttgtcagccagggggtatcttctgaatatttcttttgaaaaggataacacagtaaattatttttatgaattatcccatggactcattaacaccctttcatgatgctttattgtcaaacacgttatggctgacatcaaaaaaaaccggatttcctctgctagcgggtaatcaccttcccggtgttttcggttggtctggttactcctgtctggttattagcaagataattgctataaacagtggaaaactcatcgtacataatctggtgatgattttcccctgaccggaagaa

SEQ ID NO: 666 - DNA, 1185 bp, Escherichia coli
atgttcctgctggtacatcctaatggttcccgttactggcgtctccgttatcgtattctgggtaaggagaaaaccctggcacttggtgtgtatccggaagtttctctctccgaagctcgtacaaaacgggatgaggcccgaaaactgatttcggagggggttgacccttgcgaacagaaaagagctaaaaaagtagtccctgatttacagctctcttttgaacatatttgcacgacgctggcatgccagttaaacaatgggcaccattcacacgataaagtactcaaaagcctcgagactcacgttttcccctttatcggcaaccgggatatcacaacactcagtaccccggatctgcttatccctgttcgtgctgcagaagttaaacaaatttatgaaatcgccagtcgtctgcagcaaagaatatctgctgtaatgcgttatgccgtacagtctggcatcatcagatataacccggctctggatatggctggtgcattgaccacggtaaaacgccagcatcgccccgctcttgatctttcacgtctgcctgaacttctgtcgcgtattaacagttataaaggtcagcctgtcacccggcttgctgttatgctggaattactggtttttattcgctccagtgaactcagatatgcccgctggtctgaaattgatattgacaatgccatgtggactattccagccgaacgcaaacctctgccaggcgtaaaattctcacaccggggctccaagatgcgaacaccacatcttgtgccactcagccaacaggctgtagccatactggcagaacttcagacatgggcaggtgaaaatggtctgatctttacgggagcacacgacccacgtaaaccaatcagtgaaaataccgtaaataaggccctcagagtgatggggtatgacacaaccaaggaagtctgtggccatggattccgggcgatggcgtgcagtgcattgattgaatccggcttatggtcaagagatgcggttgaacgtcagatgagtcatcaggagcgcaacggagtacgtgccgcgtatattcataaagcagaacatctggaagaacgtcggcttatgctgcaatggtgggcagattttctggatgcaaacagggaggagtgtatcagtccgtttgaatatgcaaaagttaacaatccactgaaaagg

SEQ ID NO: 667 - protein, 395 aa, Escherichia coli
MFLLVHPNGSRYWRLRYRILGKEKTLALGVYPEVSLSEARTKRDEARKLISEGVDPCEQKRAKKVVPDLQLSFEHICTTLACQLNNGHHSHDKVLKSLETHVFPFIGNRDITTLSTPDLLIPVRAAEVKQIYEIASRLQQRISAVMRYAVQSGIIRYNPALDMAGALTTVKRQHRPALDLSRLPELLSRINSYKGQPVTRLAVMLELLVFIRSSELRYARWSEIDIDNAMWTIPAERKPLPGVKFSHRGSKMRTPHLVPLSQQAVAILAELQTWAGENGLIFTGAHDPRKPISENTVNKALRVMGYDTTKEVCGHGFRAMACSALIESGLWSRDAVERQMSHQERNGVRAAYIHKAEHLEERRLMLQWWADFLDANREECISPFEYAKVNNPLKR

SEQ ID NO: 668 - DNA, 237 bp, Escherichia coli
atgctcttcctcttaaggggaagagcacccgcctcaatcaatttcttttttatgccggcggaaccatcagccaggctgaggttctcattcaataactcaacgtcttaccacagaacagaattcactgtattatcatgggcaacgttaatcccggacaataaaaggacaccgatgccaggcatcacaatttttatagcctgcaggttatggtccatccttttttacaggttcagaata

SEQ ID NO: 669 - protein, 79 aa, Escherichia coli
MLFLLRGRAPASINFFFMPAEPSARLRFSFNNSTSYHRTEFTVLSWATLIPDNKRTPMPGITIFIACRLWSILFYRFRI

SEQ ID NO: 670 - DNA, 1041 bp, Escherichia coli
atgactggcaaattacgctttgaagtgaacgataaccagggctgtttcatatttccggaaacctggtttggctcgttgctggatgagtttgaagaactgattgatgcatacgatgcggatgaaatcagcgaaacaagttacatcaacaaactcaggcgccttgcccgacaggagaatgactttattgatgtacacgcttacctggcatacgtatttctggagcagaatgccccgcgtaaggcgctgaatgcagcccttaaagggctggcagttggcaatcgtcttatccctgaaggtttcagtggcagaatcatctggatacatcctgacaaccgaccttttcttcgtgccctctatgcggcaatcctggcaaatgcacatttacagcgtcatcaggatgccatcatgctcattgaaaaaatactggattacaatcccgaagataatcatggtgcacgctggctactgggaccggaactgttacgcactggcgctcatgaacaggcacgccatatactgcaggaacatgcagatgaattttcaccttactggtatgaactcggccttctgcattttcttaatggggaactggtaaaagctgcaactgcatttcgtcgcggctttgcggcaaatacttacatcgcagaaatactgtgcggaaatctgcatccatttccacttgctgtatggcataacttttcaggcggtccggatactgccgaagattattatgccacataccacccgttatgggggcaatatccggaagcattgctgtttgtaaactggctctataatcattcctctgtgctgcatgaacgggcagaaatcattaaatgcgccgaaatgctgatgcaggaagatgatttcgaaatatgcgaaagtattttaagacagcaggagaagttgcgtgaaagaattgatgagacgctttctgagaaaattgtacagaaatgcagaaatatgaatggtgaatatgtctggccctggatattgccgttttcagcggcaggcatgaaacatactggcatacagtatcag

SEQ ID NO: 671 - protein, 347 aa, Escherichia coli
MTGKLRFEVNDNQGCFIFPETWFGSLLDEFEELIDAYDADEISETSYINKLRRLARQENDFIDVHAYLAYVFLEQNAPRKALNAALKGLAVGNRLIPEGFSGRIIWIHPDNRPFLRALYAAILANAHLQRHQDAIMLIEKILDYNPEDNHGARWLLGPELLRTGAHEQARHILQEHADEFSPYWYELGLLHFLNGELVKAATAFRRGFAANTYIAEILCGNLHPFPLAVWHNFSGGPDTAEDYYATYHPLWGQYPEALLFVNWLYNHSSVLHERAEIIKCAEMLMQEDDFEICESILRQQEKLRERIDETLSEKIVQKCRNMNGEYVWPWILPFSAAGMKHTGIQYQ

SEQ ID NO: 672 - DNA, 216 bp, Escherichia coli
atgaattatcccatggactcattaacaccctttcatgatgctttattgtcaaacacgttatggctgacatcaaaaaaaaccggatttcctctgctagcgggtaatcaccttcccggtgttttcggttggtctggttactcctgtctggttattagcaagataattgctataaacagtggaaaactcatcgtacataatctggtgatgattttcccc

SEQ ID NO: 673 - protein, 72 aa, Escherichia coli
MNYPMDSLTPFHDALLSNTLWLTSKKTGFPLLAGNHLPGVFGWSGYSCLVISKIIAINSGKLIVHNLVMIFP

SEQ ID NO: 674 - DNA, 309 bp, Escherichia coli
atgtatccagatgattctgccactgaaaccttcagggataagacgattgccaactgccagccctttaagggctgcattcagcgccttacgcggggcattctgctccagaaatacgtatgccaggtaagcgtgtacatcaataaagtcattctcctgtcgggcaaggcgcctgagtttgttgatgtaacttgtttcgctgatttcatccgcatcgtatgcatcaatcagttcttcaaactcatccagcaacgagccaaaccaggtttccggaaatatgaaacagccctggttatcgttcacttcaaagcg

SEQ ID NO: 675 - protein, 122 aa, Escherichia coli
MCICQDCRIEGTKKRSVVRMYPDDSATETFRDKTIANCQPFKGCIQRLTRGILLQKYVCQVSVYINKVILLSGKAPEFVDVTCFADFIRIVCINQFFKLIQQRAKPGFRKYETALVIVHFKA

SEQ ID NO: 676 - DNA, 5572 bp, Escherichia coli
aagtgataatttttttcattttgataatgaagtttggtaggggagagacagtataaagtgttcgggtggacaaaaaaacaactgtaaaaagacctgaaagcagaatgaattaatgcaatgtcaggtttttaatccatccgatgttcccccttttccatggcgtcgcgatcaaaaaatcgctgaatttttccctcggacatcaatgccgctcgatcagacatatgcgcgatgacatcggcatcgtgactgaccagcagatatgtcatttggtgttccagcttaagttgattcaacaaattaaggatttccgcttgtaccgacatatccaacgccgaggtgggttcatccagcagaagaagttgtggtcgtaacaacagggcgcgagcaataaccacacgttgccgttgaccaccggaaagctggtgtgggtagcgacgagcggcgtcgaaaggcaagccaacctgttccagtgcagtctggacgcgtttttctatttctctttcgccacgaattttgagtggttcagccagcgttcgccacagagtatgattgggatgcaacgaggcatagggatcctgaaacaccatttgcacattgcggcggagatcgccctgaaaacgcattcctggtttgatggtgtgcccaaacagtgacacctgacctgtgccaggtcgcgctgtaatccagcaattacgcgcaaaatcgtggattttccgcagcctgattcgccaattaaactaaatgtctctccggcattaaccgaaaaactggcggcagaaactgcggttttctcagcaaaagtcacctgtaagtgattaatttcaacaatcgtcatggtatttctccggcgtcattgccgtcctgtccagcgtcggcagcatctgcccgtaagtttgtgcatttgggcggcaagtccacagtgtgcgcgtgtaaggatgcgttgctgtaggtagcgcagcagcgtgcatttcatccaccttatttccctgatacatcaccagcacccgatggcaaaattgggcaactaatggcaggtcgtgactgatcagcaacattgccatctgacgttgttcacactgggtaaccagcagttccagaatctgattacgcaggcgcacatccagtgctgatgttggctcatcggcaatcaatacccggggatcgttgatgagcgcaattgcaatcatcactcgctgccccatgccgccagaaagttcacgaggatagctttgcagtactcgcgtattgaggccgacagcctgaattgcggtgtttattttctcttctttctcgcggcggttcagacgttgatggagcgtaagcgcctcttccagttgcgcttttactgtctttactggattaagcgcgtaacgcggatcttgcaataccatcgcgatatcgttaccgcgcaactgttgccatccacgcgcgttaagggtgagtgcatcacgccccagaatgttaagtgtgtccgcggttactacacccggtttacgcaccagccccatcagggcgcgggcggtcatggacttacctgaacccgactcaccgaccagcgccagacgttcattgcctaatgtaaaactgacattgttgacgacccgggactccggataatcgacgcagagattgttgatactaagacgtgagtcagtcatgttgaggctccagaacatcgcgcaagccatcacccagcagattaaaggccagactggcaattaagataattgcgccgggagcggcggcaatccaccattgatcaaaaatgacctgcataccgtcggcgatcatggctccccattccgccattggcgggcgagcaccaagcccaagaaaacccaggccagcagccgccagaatgatacccgctaaatccagcgccagacggacaatggcagatggcaggcacaatggcaaaatatgaccagccagcagacgcctgccgcggatgcccatcatttctgcggcggcaagataatcactgtgtcgcagacgttggatctcactccgtgcctgacgcgcataagcaggccaggtggttaatgccagcgccagtgcgccgttaaccagccccggccccagcatggcaacaaaagcaaaagccagaattaaacgcggcattgacattactacgtcagtaaaacgcatcagcacgcgttccagccagccgccgtagtacccggctaaaatgccaatcagcagaccgaccgggagtgtaatgattgtcaccaatgccaccagccccagtgccggacggctgccgtagattaaacgtgaaagtaggtctcgcccgtaactgtcagtgccgagccagtgctgacgactcggtgcttgtaaccgcgccgccgcatcctgccagttaggatcgtgaggtgccagccacggcgcgaagagcgcaattagcatcaataacaggataattatcaacccgcaaaacgcggcgggtgaatggcgtaaacggcgtaaaaagagaaacatcggcatcagcgtaacctcggatcggtcagccggaccagcaggtcggttaagttatttatcaacacaaagcagacgccaatcagcagcgttcctcccatgattgctgtggtatcacccgcgaagagcgctgtagtgaggtagcgcccaatacctggccatgaaaagacggtttctgtcagtaccgcgccttccagcattgatgtataggcgagggcgataacagtgagcaaggtgccgcgaatgttgggtaaaacatgacgtagcaaaattgtcatctcgctggctcctttggcgcgcgccagcagaatatattctttattcatttcgccaagacaggcggaacgagtcaggcgcgtaatactggcgagcgagaagtacgccagtaataaaaccggaagtatcaaatggttgattgcattggtaaatgcctcgcgatcgccagaaagccacgtatcaatcagcgcaaatccgctgcggggttctatggtgaattgataaatatcatccagcctgcccggcccggcactccattgcagtctggcgtagaacagcgccagcatcagcagaccaagccaaaaaacagggacggaatttcccagtagagttaatgttcgcacggtgaaatccagcggagaaccgacataacgggcgcaaagtacacccgcaatgacgccgacaacagcaccgacaataagcgccaacgttgccagttcaatggtcgccgggaatgctgatagcaagtcctgaagtactggttgcccggtggagctggcgatgcccagatcgccgtgtgccagattcatcaggtaatgccagaactggacggctaacggctgatccaatcctaactggtggcgtacctgatcataggtggactggctggcgtgatcgccaacgatttgtagtacgcgatcgaccggtgagagagccgaaagcgcaaaggtaatcagcagcaggccgagtagcgtcagagcaacggtaaacagcccttgcaacagcgcgagcagagggcgcttgcctcgccatctcgcgcgagtggaaaaaacgacagacatgatctttccatacagtgataaatcagcggctggcctgcaatacaggccagccctggtaccgcgcccggtaacatggctggacgcgagttgcatacagggttatttggttacctgatcaaaccagaccatatcggcattcaacccttgttgatacccctgcacattatcacgcatgacaatttgcgttttgccttgatcaataaagacatacggggaactacgttgtagttcttgttgcattttcttatacaaatcaagacgtttagtgctatcaggttcagcgatggccgccagcgtttctttgttcagttccgggattttccagccgtttaacccggcaacggtgctggatttgccatcgttataggcgaaagagctggcgttggaatgtgcgtcaaaataatcaggcaaccacatacgaatggccccctgatgctggtgggcgcgaacgcgagagtagacctgactccctgcggctggcagcaaatcaacttttacaccgccctgagcaaagctggcctgaattgactgcgcgatggtaataaatggcggtttattttcgacatcaagcgtgaagtgcgggtctttgattccggctttagcgaggatctcttttgctttggctggattaaaggtaaacggtgtttcttccagtgctccaggaaagcccacgggcaggaaactttgatgggtaaaatattgtccttttaagagatttttggtgatgccgtcgtaatcgaccaaccagcgagcggcctcccagaacgcaggattactcatcagcgggttatccttgttaccggtattgaaggccaggtagttctgttcggcggaggcaatgctcatcacttttacgccaggtttaccctgtaatgcatcgatttgatcggctcccagatcacgagccatatcagcatcaccttgttggatcagcaggcgacgcgttgccggatcgggaacatttttgatgatgacgtttttcagtttcggggcgccggttggtgagctggcgttggcttccatcacgatggcctgatgcggttggtaagtacgcattttaaacgcgccgctgccagcggaatgcatcttcagccattcattaccaaagtcgttatttttggcgtttggcgcaaccagcttctcgtcaacaattgaggcgattggtgtggagagaatattcagtgccagcgccgggctgacgtcggcactccattgcacctggacggtatggtcatcgattttcttcaactggctggcgatattttctggctgccatcccagcacattgagaataaacgcaccggatttattcagtgtgacagcccggacataagagtaaatcacatcttccgggcgtaccggattaccagaggcaaatttcgcatcgcttttcagttttatggttagcgttttggctgcggggtcagcctgccaactttccgccagaatcggagtgattttcgtcggatcattacggtccggttgtactacgcgttgatacagacttggtacagtctgaatacttgagagttcattagcttctgccgggtccagactcacaatatcatccagcccctgggctacaaccaacgtattaggcggtgtagcggcaacggttgtggcggaaattgtgcttaaaaccagtaaaggtaatagttttttaatcatatgcttcccaatccctgaaattactttgaggttattaatatgctatcagacggggtttcgctgcattaatcgcgccagaatatcccgttaatagaacgagttaaatggtcgatgatttctcaccttaccgaaattttgtttatcaaatgtaaagtattattacgttaggccgcgatgagaattgagtaaagataattctcatttgcaatcgtgactggaatagaagaacaaccgagaagacgtcgctaataaccaggatgggctggtttgactgcgcaggtatgtataaaaaaatccggaaacagagagtcgtttccggattgatacaaaggcgttgggtaatatcgccgcttttaacgtgagtttacgcg

SEQ ID NO: 677 - DNA, 702 bp, Escherichia coli
atgacgattgttgaaattaatcacttacaggtgacttttgctgagaaaaccgcagtttctgccgccagtttttcggttaatgccggagagacatttagtttaattggcgaatcaggctgcggaaaatccacgattttgcgcgtaattgctggattacagcgacctggcacaggtcaggtgtcactgtttgggcacaccatcaaaccaggaatgcgttttcagggcgatctccgccgcaatgtgcaaatggtgtttcaggatccctatgcctcgttgcatcccaatcatactctgtggcgaacgctggctgaaccactcaaaattcgtggcgaaagagaaatagaaaaacgcgtccagactgcactggaacaggttggcttgcctttcgacgccgctcgtcgctacccacaccagctttccggtggtcaacggcaacgtgtggttattgctcgcgccctgttgttacgaccacaacttcttctgctggatgaacccacctcggcgttggatatgtcggtacaagcggaaatccttaatttgttgaatcaacttaagctggaacaccaaatgacatatctgctggtcagtcacgatgccgatgtcatcgcgcatatgtctgatcgagcggcattgatgtccgagggaaaaattcagcgattttttgatcgcgacgccatggaaaagggggaacatcggatggat

SEQ ID NO: 678 - protein, 234 aa, Escherichia coli
MTIVEINHLQVTFAEKTAVSAASFSVNAGETFSLIGESGCGKSTILRVIAGLQRPGTGQVSLFGHTIKPGMRFQGDLRRNVQMVFQDPYASLHPNHTLWRTLAEPLKIRGEREIEKRVQTALEQVGLPFDAARRYPHQLSGGQRQRVVIARALLLRPQLLLLDEPTSALDMSVQAEILNLLNQLKLEHQMTYLLVSHDADVIAHMSDRAALMSEGKIQRFFDRDAMEKGEHRMD

SEQ ID NO: 679 - DNA, 834 bp, Escherichia coli
atgactgactcacgtcttagtatcaacaatctctgcgtcgattatccggagtcccgggtcgtcaacaatgtcagttttacattaggcaatgaacgtctggcgctggtcggtgagtcgggttcaggtaagtccatgaccgcccgcgccctgatggggctggtgcgtaaaccgggtgtagtaaccgcggacacacttaacattctggggcgtgatgcactcacccttaacgcgcgtggatggcaacagttgcgcggtaacgatatcgcgatggtattgcaagatccgcgttacgcgcttaatccagtaaagacagtaaaagcgcaactggaagaggcgcttacgctccatcaacgtctgaaccgccgcgagaaagaagagaaaataaacaccgcaattcaggctgtcggcctcaatacgcgagtactgcaaagctatcctcgtgaactttctggcggcatggggcagcgagtgatgattgcaattgcgctcatcaacgatccccgggtattgattgccgatgagccaacatcagcactggatgtgcgcctgcgtaatcagattctggaactgctggttacccagtgtgaacaacgtcagatggcaatgttgctgatcagtcacgacctgccattagttgcccaattttgccatcgggtgctggtgatgtatcagggaaataaggtggatgaaatgcacgctgctgcgctacctacagcaacgcatccttacacgcgcacactgtggacttgccgcccaaatgcacaaacttacgggcagatgctgccgacgctggacaggacggcaatgacgccggagaaataccatgacgattgt

SEQ ID NO: 680 - protein, 278 aa, Escherichia coli
MTDSRLSINNLCVDYPESRVVNNVSFTLGNERLALVGESGSGKSMTARALMGLVRKPGVVTADTLNILGRDALTLNARGWQQLRGNDIAMVLQDPRYALNPVKTVKAQLEEALTLHQRLNRREKEEKINTAIQAVGLNTRVLQSYPRELSGGMGQRVMIAIALINDPRVLIADEPTSALDVRLRNQILELLVTQCEQRQMAMLLISHDLPLVAQFCHRVLVMYQGNKVDEMHAAALPTATHPYTRTLWTCRPNAQTYGQMLPTLDRTAMTPEKYHDDC

SEQ ID NO: 681 - DNA, 831 bp, Escherichia coli
atgccgatgtttctctttttacgccgtttacgccattcacccgccgcgttttgcgggttgataattatcctgttattgatgctaattgcgctcttcgcgccgtggctggcacctcacgatcctaactggcaggatgcggcggcgcggttacaagcaccgagtcgtcagcactggctcggcactgacagttacgggcgagacctactttcacgtttaatctacggcagccgtccggcactggggctggtggcattggtgacaatcattacactcccggtcggtctgctgattggcattttagccgggtactacggcggctggctggaacgcgtgctgatgcgttttactgacgtagtaatgtcaatgccgcgtttaattctggcttttgcttttgttgccatgctggggccggggctggttaacggcgcactggcgctggcattaaccacctggcctgcttatgcgcgtcaggcacggagtgagatccaacgtctgcgacacagtgattatcttgccgccgcagaaatgatgggcatccgcggcaggcgtctgctggctggtcatattttgccattgtgcctgccatctgccattgtccgtctggcgctggatttagcgggtatcattctggcggctgctggcctgggttttcttgggcttggtgctcgcccgccaatggcggaatggggagccatgatcgccgacggtatgcaggtcatttttgatcaatggtggattgccgccgctcccggcgcaattatcttaattgccagtctggcctttaatctgctgggtgatggcttgcgcgatgttctggagcctcaacatgac

SEQ ID NO: 682 - protein, 277 aa, Escherichia coli
MPMFLFLRRLRHSPAAFCGLIIILLLMLIALFAPWLAPHDPNWQDAAARLQAPSRQHWLGTDSYGRDLLSRLIYGSRPALGLVALVTIITLPVGLLIGILAGYYGGWLERVLMRFTDVVMSMPRLILAFAFVAMLGPGLVNGALALALTTWPAYARQARSEIQRLRHSDYLAAAEMMGIRGRRLLAGHILPLCLPSAIVRLALDLAGIILAAAGLGFLGLGARPPMAEWGAMIADGMQVIFDQWWIAAAPGAIILIASLAFNLLGDGLRDVLEPQHD

SEQ ID NO: 683 - DNA, 1047 bp, Escherichia coli
atgtctgtcgttttttccactcgcgcgagatggcgaggcaagcgccctctgctcgcgctgttgcaagggctgtttaccgttgctctgacgctactcggcctgctgctgattacctttgcgctttcggctctctcaccggtcgatcgcgtactacaaatcgttggcgatcacgccagccagtccacctatgatcaggtacgccaccagttaggattggatcagccgttagccgtccagttctggcattacctgatgaatctggcacacggcgatctgggcatcgccagctccaccgggcaaccagtacttcaggacttgctatcagcattcccggcgaccattgaactggcaacgttggcgcttattgtcggtgctgttgtcggcgtcattgcgggtgtactttgcgcccgttatgtcggttctccgctggatttcaccgtgcgaacattaactctactgggaaattccgtccctgttttttggcttggtctgctgatgctggcgctgttctacgccagactgcaatggagtgccgggccgggcaggctggatgatatttatcaattcaccatagaaccccgcagcggatttgcgctgattgatacgtggctttctggcgatcgcgaggcatttaccaatgcaatcaaccatttgatacttccggttttattactggcgtacttctcgctcgccagtattacgcgcctgactcgttccgcctgtcttggcgaaatgaataaagaatatattctgctggcgcgcgccaaaggagccagcgagatgacaattttgctacgtcatgttttacccaacattcgcggcaccttgctcactgttatcgccctcgcctatacatcaatgctggaaggcgcggtactgacagaaaccgtcttttcatggccaggtattgggcgctacctcactacagcgctcttcgcgggtgataccacagcaatcatgggaggaacgctgctgattggcgtctgctttgtgttgataaataacttaaccgacctgctggtccggctgaccgatccgaggttacgc

SEQ ID NO: 684 - protein, 349 aa, Escherichia coli
MSVVFSTRARWRGKRPLLALLQGLFTVALTLLGLLLITFALSALSPVDRVLQIVGDHASQSTYDQVRHQLGLDQPLAVQFWHYLMNLAHGDLGIASSTGQPVLQDLLSAFPATIELATLALIVGAVVGVIAGVLCARYVGSPLDFTVRTLTLLGNSVPVFWLGLLMLALFYARLQWSAGPGRLDDIYQFTIEPRSGFALIDTWLSGDREAFTNAINHLILPVLLLAYFSLASITRLTRSACLGEMNKEYILLARAKGASEMTILLRHVLPNIRGTLLTVIALAYTSMLEGAVLTETVFSWPGIGRYLTTALFAGDTTAIMGGTLLIGVCFVLINNLTDLLVRLTDPRLR

SEQ ID NO: 685 - DNA, 1566 bp, Escherichia coli
atgattaaaaaactattacctttactggttttaagcacaatttccgccacaaccgttgccgctacaccgcctaatacgttggttgtagcccaggggctggatgatattgtgagtctggacccggcagaagctaatgaactctcaagtattcagactgtaccaagtctgtatcaacgcgtagtacaaccggaccgtaatgatccgacgaaaatcactccgattctggcggaaagttggcaggctgaccccgcagccaaaacgctaaccataaaactgaaaagcgatgcgaaatttgcctctggtaatccggtacgcccggaagatgtgatttactcttatgtccgggctgtcacactgaataaatccggtgcgtttattctcaatgtgctgggatggcagccagaaaatatcgccagccagttgaagaaaatcgatgaccataccgtccaggtgcaatggagtgccgacgtcagcccggcgctggcactgaatattctctccacaccaatcgcctcaattgttgacgagaagctggttgcgccaaacgccaaaaataacgactttggtaatgaatggctgaagatgcattccgctggcagcggcgcgtttaaaatgcgtacttaccaaccgcatcaggccatcgtgatggaagccaacgccagctcaccaaccggcgccccgaaactgaaaaacgtcatcatcaaaaatgttcccgatccggcaacgcgtcgcctgctgatccaacaaggtgatgctgatatggctcgtgatctgggagccgatcaaatcgatgcattacagggtaaacctggcgtaaaagtgatgagcattgcctccgccgaacagaactacctggccttcaataccggtaacaaggataacccgctgatgagtaatcctgcgttctgggaggccgctcgctggttggtcgattacgacggcatcaccaaaaatctcttaaaaggacaatattttacccatcaaagtttcctgcccgtgggctttcctggagcactggaagaaacaccgtttacctttaatccagccaaagcaaaagagatcctcgctaaagccggaatcaaagacccgcacttcacgcttgatgtcgaaaataaaccgccatttattaccatcgcgcagtcaattcaggccagctttgctcagggcggtgtaaaagttgatttgctgccagccgcagggagtcaggtctactctcgcgttcgcgcccaccagcatcagggggccattcgtatgtggttgcctgattattttgacgcacattccaacgccagctctttcgcctataacgatggcaaatccagcaccgttgccgggttaaacggctggaaaatcccggaactgaacaaagaaacgctggcggccatcgctgaacctgatagcactaaacgtcttgatttgtataagaaaatgcaacaagaactacaacgtagttccccgtatgtctttattgatcaaggcaaaacgcaaattgtcatgcgtgataatgtgcaggggtatcaacaagggttgaatgccgatatggtctggtttgatcaggtaaccaaa

SEQ ID NO: 686 - protein, 522 aa, Escherichia coli
MIKKLLPLLVLSTISATTVAATPPNTLVVAQGLDDIVSLDPAEANELSSIQTVPSLYQRVVQPDRNDPTKITPILAESWQADPAAKTLTIKLKSDAKFASGNPVRPEDVIYSYVRAVTLNKSGAFILNVLGWQPENIASQLKKIDDHTVQVQWSADVSPALALNILSTPIASIVDEKLVAPNAKNNDFGNEWLKMHSAGSGAFKMRTYQPHQAIVMEANASSPTGAPKLKNVIIKNVPDPATRRLLIQQGDADMARDLGADQIDALQGKPGVKVMSIASAEQNYLAFNTGNKDNPLMSNPAFWEAARWLVDYDGITKNLLKGQYFTHQSFLPVGFPGALEETPFTFNPAKAKEILAKAGIKDPHFTLDVENKPPFITIAQSIQASFAQGGVKVDLLPAAGSQVYSRVRAHQHQGAIRMWLPDYFDAHSNASSFAYNDGKSSTVAGLNGWKIPELNKETLAAIAEPDSTKRLDLYKKMQQELQRSSPYVFIDQGKTQIVMRDNVQGYQQGLNADMVWFDQVTK

SEQ ID NO: 687 - DNA, 8738 bp, Escherichia coli
agtaaaagaggcagaaattcttatcaaccgcaaggatgatgaatgagtctgtcgctagttgtcgacctccgcctggggcttctcatccccccggtctatgcaatatacgaaaaaaaagctcgtactttcgtacgagctcttctttaaatatggcggtgagggggaccgcctgaaataaatctgacttaatccaggggggttatataatttcattataaacaatgtattacactttttgttgtccgatattatctaatgtattcttagtgaagcgagagactaatggcatactggatggcataccagagtgacgggaattagcgtatggcagtattgacggatacgaaagcaagacatatcaaacctgatgacaaaccattgccccatgggggaattaccggactgacccttcatccttcttcagtaaaggggcgggggaaatgggtttttcgttatgtaagtccggtgacacaaaaaagacgtaatgctggattgggaacttacccagaggtcagtattgctgaagctgcacgtactgcccggataatgcgagagcaacttgctgcaggtgatgatcctctggagattaaaaaggctgaatctgagaaagtcgttatcccaacatttgccgatgcagccaggcgtgtacatgcagaactgtctcctggatgggaaaatccaaagcatgtaaggcagtggttatcgacgcttgagaattacgcgtttcctcaactgggagcaaaaacgctggattcgattacggctgcggacgtggcagaaacactgcgtccagtctggttaaccttgtcagaaacggcaagccgggttaaacagcgcattcatgttgttatgcagtggggatgggcgcacggtttttgtgtggcaaatcctgttgatgtggttgaccatttgcttcctcagcagacaagaggacgtgatgaacaccaacccgcaatgccctggaggcagttaccgctttttgtggcgaccagtgtgtatagtgatgaaccttataatgttacccgcgcactgttattaatggtgatacttacagcaactcgctcgggcgaagccaggggaatgcgctgggctgaaattgattttcataagcgggtatggactatacctgcagaaagaatgaaagctaggctacagcatcgtgttcctttatcccggcaggctatttacattctggaaaatatacgtggcctgcatgatgaactggtgttcccttcacccagaaagcagcagatcctttccgatatggtgttgacaagttttctgcgtaaaaagaaagccgtcagtgacattccggggcgagttgccacagcacatggttttcgctcaacattcagggactggtgtagtgaacaggggtattcgcgggatctggcggaaagggcgctcgctcatacgctgaaaaataaggttgaggcggcatatcatcgtactgatctactggagcagcgtgtaccgatgatgcaggcatgggcggattatgtgatgtctcaaattgtgaataaataatagtgaaaatgtatattgtacgatcatgatttgatatgtgatcgtggcagtagtaattaaggaaccgcttttatgtcaaatgtattgagctgataattatcagatcgtcaggaaagcgtatttttataaacaggggattactcaacaatctcctgtttataaaaaacaatttgcctgttttaacgtttcactcctgctgagactgaattattcctagtgcgtcataaatcagtcttctgcgtagtttattgtttttatctgcaccatataacataaatatattttcaactttttcttcaggtgttctgagataatggataagaaaggttatcattccaacacaatggaataaagtgaatccatcaaacaggcttatcaggtttccttttttttcccgtgctgtaagtattttttcgcgggtaagaatatttgccagttcatggggggctgatatgtttctgctgtctataatgttatttattttaccaagggctatatcaacttcctgtaataggttatttatcatagctgagtgaatgttattggtttcatgttcctgacagtttatgaacttataaatcattgagttatacagaaatattactcttcctaataaatatgtgtttgtgtcattttgaagacaggactctgggtattcgtgatccagtgaaataaggttaatggactcgccctgataagtcataaaataattgatgtcatttaataatgctcggatatttacatgatttttactgaattttattttaaatgctatctttagtatagcaaacgcggcaatgataaatccaaaaggtaatttctcatagttcagtttattgatggtgcgatgaacactttcagtctttcctgaagtaagttgtatcaaacagttaacaaattccgtatagccatttaagacataatggcatgaagaatcttttaaagtgttttctatgttttgtaatgtgacgccgttgttcaatgtataaatgtaaccgccaaagacaatgttttcaatctcaacgacacaatttattgttttttgttcaggataaagataaatatcagaaatactatagtctcgtattgcgtcaatggcctcccacgataatgcactgtcaattttcagtgtataaaatggtgagttctcattaggaaagtaatatatgtatttgttcagtgtattcattacatctattgggttggttaaatataataactggcattcatattctgaaacttctctttcgcttatcagcattttatataaagttgccagggcgcttgttaatgaagttcgtctttcgaaagccagtaatatagtgagataataacatgcaacttgaattttatctaagtcagaaattattttttccttgtcttcattacttaaataaagcagatgtttacaggtttctttgcatgtgttgatagttgcggtaagttttgtttttcctggtgtactgtttttgcgaatattacgaatgaattcatatacgccatcaaagatatatttgaaatgcgcattcgctggtgtgtatccggataaacataacttaacgtaatttcgctgatatgtccttgcagcatgatatatatcatcctcattatccggtatctgagtgagaaaagaatgaatatgatagtaaaatgccatctcattatccgggcgatatgtgttcctgatgtcgagtgcgagaatcattggtacaatgtcattaaaatatttttgttttattatttgatgtgttttgtctgtaaaaacagaatagtgcattagcttaacatagagatcttcatatctcctaaatataacttttcgttgttctgtactcaatacttgttctttatcaataatgtttattaattcatcaaacatgtcgcccagtgaatgttgatgtgaggaaaaatttttaatatttcggatgtcacgggtattctggtttttagccagaacaccaaaatatgaaaagacatcatacattatagtgataaaattatacataacattctccttttattgcactatataaaattttaacattatatcattttgcttttctgttaactggttttcatttttgaatcaatattttctgaacagggtaatagtacacgtattaacagattatgtcagaaggccccggtgatgccttctgacgatagattaatgtggtattctattggtatctggagaccatatggcaacagttacagtacattctccccgctgtaattcctataaagtgtaccattatgatcacagcacctcagatcatgagcgtttccagtgctaatcctgcaaacgtgtgtatttcaactgaattacatctacgaaacccgaaaaccaggcattaaagagcaaattgttgaaatggttcataacggagccggggttcgcgatagctccagaacgctgaaggtggatatcaacaccgtcattctcactttataaaacgctcaccacgcaaagtaaccacatctccagtcgccagtgccgatgtgacgcttatctgcgaacttgatgaacaatggagttttgtcgaaaacaaagctcgtcagcagtggcactggtatgcgtataccaccaaatctggaggtgtgctggcttacacttttggtcctcgcactgatgaaacatgtcgtgagttgccggaactcctgaagccattctccacaggcatgataaccagagacaaccggagcagttataccagagaaatgccacaggataagcatcttgtcggcaagatatttacccggcgcattgagcgcaacaatctgacacttcgtactcacatcaaacgaccagcccggaaaacgatttgcttttcacgctccctggaaattcacgaaaagccattggttcatttatcgaaaacactgtactactgactggagtcattaccagggcctcttttgctggtttttaccaatgaatgataatgagaatcgacagcgataaggggaaagtaaaataacaataatgctgtgttctatcgtattgatttttaattatttattgtctttttgctcagcccacttttttacgcagacaaatttacccggggaatacaaactgtaacgacagttcaccacactatgggggataaaatgccagatcaatccggatactgctggactccttcacgcatcttacggatgcctgaactgagccaattgttaggtatatctcgttcgacaatttacgaaaaaatgaatccgttatcgaaatactacgatgcaaccttccccaggccggtacgtcttggtagtggttctgtgggctggcgttcatcagctattgacgaatggcttactttacatactgtacctgccagatcagcagtcaaaggtgttaatgacgaagtgcgacatacgctttcttcagatatgaccatgagcagataagtttttgtcatcacgtgatcacctcaggaggaaaaagaagcataagaacaatttagccagaagtttaattgataaacagaatttccagcattcattgttgaaagagcagctattgtcgctattgtagcggtaattgctgctataaccgaaacgtattacgaaaaaggaagcatttatgtcttacatcaaaccggatatgccgtattcagtatatgcgtgaccatcaatgatagggaaggcaataattaaagctcaatacaataaacaagtacctctgactctggttgcaatgtcagtattaacagcgatgtcaattgcctgtcagaatcaggttgacgtatgcagtcccggaaatttacgtggggccgttaatatttacactatggttctggagaaagggaaaagaccgggggaaaggtattagtgaaataatttctggaggtattaagaatgagaaatatgaatgatatttcgtggtaaataatacagtctgcactgaattaaccttatcggtttattaaacataagatctacaaatgctctgtatttctcagagcatcaggtctgaatagcagctattttcgctattgtagcgggagttgctgctattttactaacccattaatgaaaagagaggcttttatgtgcttacttgcaccagaaaatccttatccgatatatgcactaccaccgctggtgagaaatgcaataattgaaactcaaaaaaatacacaggcacctttggctatggtggcaacatccgcattaacagcgacctcaattgcctgtcagaatcaggttgacgtgtgcagacctggaaatttacgtgggcctgttaatctttactctctgattctggctgattccggtgaaaggaaaacgaccgtggataaagtgtttatgaaagcattttatctcagggatgaagccctggcggaagaatacgcgaaactggttgagaattacagtacagaaaaggaaatatgggagcaaaaacaaaaagcgctggaatcaaaatttcataaagagattcgtgccggtaaagattacaaggcaacagaatcagagcttgaaacgcatctgaataagtctcctgttccgccgcagatacgtcgaacaatttttaatgagacaacgatagagggaatgttaaaatattactccgatagcaatcgttcttttgctcttgtatccagtgaagggggggtaatttttgacagccgggccatgagtaaactgggaattattaacactttgtgggatggaggttctcttttcatcgacaggaaatcatctcccggaattaatttgaaggagccaagactgacgatgtcggcgatgattcagcctgatgtttaccacaaaggtttttgtacgcgaaaaaaagaacttgtgaaaacgtcaggacatcatgcaaggtttttgatgtgtcaaccaacatcaacgcaggggacaaggataataaccggagataattattcatcacagtatcaggagttatttgataagaggatcaatgaacttattgatgaaagtctggctatgagtggtgaacgacgttgccttcacttttctcctcaggctgccagaatctggacggattattacaacgatgtggaatcgaagctggggggattggggcctttaagacattgtcgggaatatgctgccaaaaatgcagagtatatggcaagactggcaggacttcttcaccatttgagcagtgaggagggggacatttccccttacactgcagaaatggggagagaattagcaatatggtacggtaatgagtatatgcggttgtctaatccgttaacttttgacaacactgctcaaaacgagactatgcgactcattccagaggagcttgaacttttcaactggataaaaagctattgcattgagaaggggatcccctgtatgaaaaaaaatgacattttacagcgtggtccgaaccgtttccggaaaaaggataaaatcaactggttactggatttactgtatgaacaaaacagagttgtaccggttattgagggaaaaacgttgtgtgtcgcacctaactttgacctcttaatgacttaatcgttgagtaacatataatctcctctgctacttgcggaggagactaatgcctttaccatgtcagcgttgtattagaaaactctggtacaggtcagtcagtaaatataactggtgtaaccactatttactattggatagagtgttgctcaggatattgtcggctttagtctgaggtgaggtgggaccttcattgttttcgtgttcaataaataatttaggttaattagtattattaatgggagttatgttatctgttatgttgtctctttttatcgtaatgtcactcctctttatgctgggtattctgtatgtgcgtaatgcgtctatccccatatactacagtgtggtggtgtatggggtttagttatgtgtaaattatgttactacactcatagcgtaatattgaaaaagttaatccactgaatgtatgtctggtttgtatttaacactagttacgtaccagaacactattagagtatattgtctttagttcgtacgttatagctccgttacagtttataagtatgggtaaatataatcttttctgtatgaaataatcttcttattgtgaggttaaatatctgtaggctctctctgcagagtctctgtttttacttaatggtacggcaatactaatagcgatgttgcctgtggctattcgatagctgacttttgtgaagatcagattacttcctgtaagtgattgaatggtgctttcttaaactcaattatattgaggtgtgtttttgccattgtaattcttactggtcctctgtttaagagagcctcactgtattctgaagtattacccccattactgtaatgaggtaatacgaaacagttttatcaggttgtctgcatactggttacccagtttattaatgccgtggtacgacgtttctgtatcctcagcatttacgtaatttcctcttcctgtgagttttataaagtaaggactataaaatgtataatgctaaccccaattacgaaatgaatttcacgattctgaaagatgtgaatgaacacatggaaggtctgtttcaacgtttttctaaactgttacctttcagaattgattttgcctacaggaaagacacgcccagtttcgggcattcctgtaagcacagtatgtgtattgaaatataccgtttacttagcgaaacccagacgatgttggcaggatattactgggtaatggaatatacaccagacaaagggcttcatattcattttatcggctatctggatgggcaacgtcacaagaactcttatcagatatccaggcaactgggggatatctggaggcggatcacggaaggggagggttattttcacctttgccgggctaaagacaaatacccggtgcgtatcgatcacgtgattcactatagtgataaatctgcggtagacgacttacgttacgcccttagctacctggctaaacaggatcagaaagaacacggtattattctgaggcgtagcaggctttccgaaaaaagcaaccggggccgaccacgactgaacagtatcctgccagggatatgttctcagctgtaatgttctgaacaacaactacgggctggctcttttttgcccgtcagggcgtcaagctgagccgtgcattattctccaactgggtggacgcatgctgccagttaatggctccgctgaatgatgccctgtaccgttatgtgatgaacacccgcctgggaacc

SEQ ID NO: 688 - DNA, 1200 bp, Escherichia coli
atggcagtattgacggatacgaaagcaagacatatcaaacctgatgacaaaccattgccccatgggggaattaccggactgacccttcatccttcttcagtaaaggggcgggggaaatgggtttttcgttatgtaagtccggtgacacaaaaaagacgtaatgctggattgggaacttacccagaggtcagtattgctgaagctgcacgtactgcccggataatgcgagagcaacttgctgcaggtgatgatcctctggagattaaaaaggctgaatctgagaaagtcgttatcccaacatttgccgatgcagccaggcgtgtacatgcagaactgtctcctggatgggaaaatccaaagcatgtaaggcagtggttatcgacgcttgagaattacgcgtttcctcaactgggagcaaaaacgctggattcgattacggctgcggacgtggcagaaacactgcgtccagtctggttaaccttgtcagaaacggcaagccgggttaaacagcgcattcatgttgttatgcagtggggatgggcgcacggtttttgtgtggcaaatcctgttgatgtggttgaccatttgcttcctcagcagacaagaggacgtgatgaacaccaacccgcaatgccctggaggcagttaccgctttttgtggcgaccagtgtgtatagtgatgaaccttataatgttacccgcgcactgttattaatggtgatacttacagcaactcgctcgggcgaagccaggggaatgcgctgggctgaaattgattttcataagcgggtatggactatacctgcagaaagaatgaaagctaggctacagcatcgtgttcctttatcccggcaggctatttacattctggaaaatatacgtggcctgcatgatgaactggtgttcccttcacccagaaagcagcagatcctttccgatatggtgttgacaagttttctgcgtaaaaagaaagccgtcagtgacattccggggcgagttgccacagcacatggttttcgctcaacattcagggactggtgtagtgaacaggggtattcgcgggatctggcggaaagggcgctcgctcatacgctgaaaaataaggttgaggcggcatatcatcgtactgatctactggagcagcgtgtaccgatgatgcaggcatgggcggattatgtgatgtctcaaattgtgaataaa

SEQ ID NO: 689 - protein, 400 aa, Escherichia coli
MAVLTDTKARHIKPDDKPLPHGGITGLTLHPSSVKGRGKWVFRYVSPVTQKRRNAGLGTYPEVSIAEAARTARIMREQLAAGDDPLEIKKAESEKVVIPTFADAARRVHAELSPGWENPKHVRQWLSTLENYAFPQLGAKTLDSITAADVAETLRPVWLTLSETASRVKQRIHVVMQWGWAHGFCVANPVDVVDHLLPQQTRGRDEHQPAMPWRQLPLFVATSVYSDEPYNVTRALLLMVILTATRSGEARGMRWAEIDFHKRVWTIPAERMKARLQHRVPLSRQAIYILENIRGLHDELVFPSPRKQQILSDMVLTSFLRKKKAVSDIPGRVATAHGFRSTFRDWCSEQGYSRDLAERALAHTLKNKVEAAYHRTDLLEQRVPMMQAWADYVMSQIVNK

SEQ ID NO: 690 - DNA, 1815 bp, Escherichia coli
atgtataattttatcactataatgtatgatgtcttttcatattttggtgttctggctaaaaaccagaatacccgtgacatccgaaatattaaaaatttttcctcacatcaacattcactgggcgacatgtttgatgaattaataaacattattgataaagaacaagtattgagtacagaacaacgaaaagttatatttaggagatatgaagatctctatgttaagctaatgcactattctgtttttacagacaaaacacatcaaataataaaacaaaaatattttaatgacattgtaccaatgattctcgcactcgacatcaggaacacatatcgcccggataatgagatggcattttactatcatattcattcttttctcactcagataccggataatgaggatgatatatatcatgctgcaaggacatatcagcgaaattacgttaagttatgtttatccggatacacaccagcgaatgcgcatttcaaatatatctttgatggcgtatatgaattcattcgtaatattcgcaaaaacagtacaccaggaaaaacaaaacttaccgcaactatcaacacatgcaaagaaacctgtaaacatctgctttatttaagtaatgaagacaaggaaaaaataatttctgacttagataaaattcaagttgcatgttattatctcactatattactggctttcgaaagacgaacttcattaacaagcgccctggcaactttatataaaatgctgataagcgaaagagaagtttcagaatatgaatgccagttattatatttaaccaacccaatagatgtaatgaatacactgaacaaatacatatattactttcctaatgagaactcaccattttatacactgaaaattgacagtgcattatcgtgggaggccattgacgcaatacgagactatagtatttctgatatttatctttatcctgaacaaaaaacaataaattgtgtcgttgagattgaaaacattgtctttggcggttacatttatacattgaacaacggcgtcacattacaaaacatagaaaacactttaaaagattcttcatgccattatgtcttaaatggctatacggaatttgttaactgtttgatacaacttacttcaggaaagactgaaagtgttcatcgcaccatcaataaactgaactatgagaaattaccttttggatttatcattgccgcgtttgctatactaaagatagcatttaaaataaaattcagtaaaaatcatgtaaatatccgagcattattaaatgacatcaattattttatgacttatcagggcgagtccattaaccttatttcactggatcacgaatacccagagtcctgtcttcaaaatgacacaaacacatatttattaggaagagtaatatttctgtataactcaatgatttataagttcataaactgtcaggaacatgaaaccaataacattcactcagctatgataaataacctattacaggaagttgatatagcccttggtaaaataaataacattatagacagcagaaacatatcagccccccatgaactggcaaatattcttacccgcgaaaaaatacttacagcacgggaaaaaaaaggaaacctgataagcctgtttgatggattcactttattccattgtgttggaatgataacctttcttatccattatctcagaacacctgaagaaaaagttgaaaatatatttatgttatatggtgcagataaaaacaataaactacgcagaagactgatttatgacgcactaggaataattcagtctcagcaggag

SEQ ID NO: 691 - protein, 605 aa, Escherichia coli
MYNFITIMYDVFSYFGVLAKNQNTRDIRNIKNFSSHQHSLGDMFDELINIIDKEQVLSTEQRKVIFRRYEDLYVKLMHYSVFTDKTHQIIKQKYFNDIVPMILALDIRNTYRPDNEMAFYYHIHSFLTQIPDNEDDIYHAARTYQRNYVKLCLSGYTPANAHFKYIFDGVYEFIRNIRKNSTPGKTKLTATINTCKETCKHLLYLSNEDKEKIISDLDKIQVACYYLTILLAFERRTSLTSALATLYKMLISEREVSEYECQLLYLTNPIDVMNTLNKYIYYFPNENSPFYTLKIDSALSWEAIDAIRDYSISDIYLYPEQKTINCVVEIENIVFGGYIYTLNNGVTLQNIENTLKDSSCHYVLNGYTEFVNCLIQLTSGKTESVHRTINKLNYEKLPFGFIIAAFAILKIAFKIKFSKNHVNIRALLNDINYFMTYQGESINLISLDHEYPESCLQNDTNTYLLGRVIFLYNSMIYKFINCQEHETNNIHSAMINNLLQEVDIALGKINNIIDSRNISAPHELANILTREKILTAREKKGNLISLFDGFTLFHCVGMITFLIHYLRTPEEKVENIFMLYGADKNNKLRRRLIYDALGIIQSQQE

SEQ ID NO: 692 - DNA, 390 bp, Escherichia coli
gtgacgcttatctgcgaacttgatgaacaatggagttttgtcgaaaacaaagctcgtcagcagtggcactggtatgcgtataccaccaaatctggaggtgtgctggcttacacttttggtcctcgcactgatgaaacatgtcgtgagttgccggaactcctgaagccattctccacaggcatgataaccagagacaaccggagcagttataccagagaaatgccacaggataagcatcttgtcggcaagatatttacccggcgcattgagcgcaacaatctgacacttcgtactcacatcaaacgaccagcccggaaaacgatttgcttttcacgctccctggaaattcacgaaaagccattggttcatttatcgaaaacactgtactac

SEQ ID NO: 693 - protein, 130 aa, Escherichia coli
VTLICELDEQWSFVENKARQQWHWYAYTTKSGGVLAYTFGPRTDETCRELPELLKPFSTGMITRDNRSSYTREMPQDKHLVGKIFTRRIERNNLTLRTHIKRPARKTICFSRSLEIHEKPLVHLSKTLYY

SEQ ID NO: 694 - DNA, 294 bp, Escherichia coli
atgccagatcaatccggatactgctggactccttcacgcatcttacggatgcctgaactgagccaattgttaggtatatctcgttcgacaatttacgaaaaaatgaatccgttatcgaaatactacgatgcaaccttccccaggccggtacgtcttggtagtggttctgtgggctggcgttcatcagctattgacgaatggcttactttacatactgtacctgccagatcagcagtcaaaggtgttaatgacgaagtgcgacatacgctttcttcagatatgaccatgagcaga

SEQ ID NO: 695 - protein, 98 aa, Escherichia coli
MPDQSGYCWTPSRILRMPELSQLLGISRSTIYEKMNPLSKYYDATFPRPVRLGSGSVGWRSSAIDEWLTLHTVPARSAVKGVNDEVRHTLSSDMTMSR

SEQ ID NO: 696 - DNA, 1440 bp, Escherichia coli
atgtgcttacttgcaccagaaaatccttatccgatatatgcactaccaccgctggtgagaaatgcaataattgaaactcaaaaaaatacacaggcacctttggctatggtggcaacatccgcattaacagcgacctcaattgcctgtcagaatcaggttgacgtgtgcagacctggaaatttacgtgggcctgttaatctttactctctgattctggctgattccggtgaaaggaaaacgaccgtggataaagtgtttatgaaagcattttatctcagggatgaagccctggcggaagaatacgcgaaactggttgagaattacagtacagaaaaggaaatatgggagcaaaaacaaaaagcgctggaatcaaaatttcataaagagattcgtgccggtaaagattacaaggcaacagaatcagagcttgaaacgcatctgaataagtctcctgttccgccgcagatacgtcgaacaatttttaatgagacaacgatagagggaatgttaaaatattactccgatagcaatcgttcttttgctcttgtatccagtgaagggggggtaatttttgacagccgggccatgagtaaactgggaattattaacactttgtgggatggaggttctcttttcatcgacaggaaatcatctcccggaattaatttgaaggagccaagactgacgatgtcggcgatgattcagcctgatgtttaccacaaaggtttttgtacgcgaaaaaaagaacttgtgaaaacgtcaggacatcatgcaaggtttttgatgtgtcaaccaacatcaacgcaggggacaaggataataaccggagataattattcatcacagtatcaggagttatttgataagaggatcaatgaacttattgatgaaagtctggctatgagtggtgaacgacgttgccttcacttttctcctcaggctgccagaatctggacggattattacaacgatgtggaatcgaagctggggggattggggcctttaagacattgtcgggaatatgctgccaaaaatgcagagtatatggcaagactggcaggacttcttcaccatttgagcagtgaggagggggacatttccccttacactgcagaaatggggagagaattagcaatatggtacggtaatgagtatatgcggttgtctaatccgttaacttttgacaacactgctcaaaacgagactatgcgactcattccagaggagcttgaacttttcaactggataaaaagctattgcattgagaaggggatcccctgtatgaaaaaaaatgacattttacagcgtggtccgaaccgtttccggaaaaaggataaaatcaactggttactggatttactgtatgaacaaaacagagttgtaccggttattgagggaaaaacgttgtgtgtcgcacctaactttgacctcttaatgact

SEQ ID NO: 697 - protein, 480 aa, Escherichia coli
MCLLAPENPYPIYALPPLVRNAIIETQKNTQAPLAMVATSALTATSIACQNQVDVCRPGNLRGPVNLYSLILADSGERKTTVDKVFMKAFYLRDEALAEEYAKLVENYSTEKEIWEQKQKALESKFHKEIRAGKDYKATESELETHLNKSPVPPQIRRTIFNETTIEGMLKYYSDSNRSFALVSSEGGVIFDSRAMSKLGIINTLWDGGSLFIDRKSSPGINLKEPRLTMSAMIQPDVYHKGFCTRKKELVKTSGHHARFLMCQPTSTQGTRIITGDNYSSQYQELFDKRINELIDESLAMSGERRCLHFSPQAARIWTDYYNDVESKLGGLGPLRHCREYAAKNAEYMARLAGLLHHLSSEEGDISPYTAEMGRELAIWYGNEYMRLSNPLTFDNTAQNETMRLIPEELELFNWIKSYCIEKGIPCMKKNDILQRGPNRFRKKDKINWLLDLLYEQNRVVPVIEGKTLCVAPNFDLLMT

SEQ ID NO: 698 - DNA, 591 bp, Escherichia coli
atgtataatgctaaccccaattacgaaatgaatttcacgattctgaaagatgtgaatgaacacatggaaggtctgtttcaacgtttttctaaactgttacctttcagaattgattttgcctacaggaaagacacgcccagtttcgggcattcctgtaagcacagtatgtgtattgaaatataccgtttacttagcgaaacccagacgatgttggcaggatattactgggtaatggaatatacaccagacaaagggcttcatattcattttatcggctatctggatgggcaacgtcacaagaactcttatcagatatccaggcaactgggggatatctggaggcggatcacggaaggggagggttattttcacctttgccgggctaaagacaaatacccggtgcgtatcgatcacgtgattcactatagtgataaatctgcggtagacgacttacgttacgcccttagctacctggctaaacaggatcagaaagaacacggtattattctgaggcgtagcaggctttccgaaaaaagcaaccggggccgaccacgactgaacagtatcctgccagggatatgttctcagctg

SEQ ID NO: 699 - protein, 197 aa, Escherichia coli
MYNANPNYEMNFTILKDVNEHMEGLFQRFSKLLPFRIDFAYRKDTPSFGHSCKHSMCIEIYRLLSETQTMLAGYYWVMEYTPDKGLHIHFIGYLDGQRHKNSYQISRQLGDIWRRITEGEGYFHLCRAKDKYPVRIDHVIHYSDKSAVDDLRYALSYLAKQDQKEHGIILRRSRLSEKSNRGRPRLNSILPGICSQL

SEQ ID NO: 700 - DNA, 3244 bp, Escherichia coli
aagcccctgctgccggttttgccgggtggcgcttgcgccttacccggtctacttattgggacaagcgtttagttaatggtcaccgcctcaaacaccagcgtttccagcggctgcaacgtaatcaccgtcgcgtttttatactcaacgggcactgttttattgctgccgtataccgctttcagactaaactgcgccgcgtttcctgccggtatttcgaaatccttcgccaaatccagatagtaggtctgtggcttatccgatgggttgcgcaaaccgagaatggctttgtctttgctccaggatgcccagccgtacacggcaagcgccgttgggtcgccgccaatccagtgggtatcaaccagcacgctggcattttccttcgaccattttgcagccttcgccagcgtatcccacttcaccttgttcagcatggacggggtaatatacagctcctgcagctgggtgccggtcgcgaagtagctccagacctgatcggcaaagtcgctgtccgtttgcaccttctctaacccgtaataggcattctcggcgctgactatcccgtggtacatcagcgagttcagcgggaatagcgggcctttacgtacaatagagcggtatgtctcggcatcacgatatgttatccactgctgcaccggcgtgccggggccatacaggtttatatcatccccctgacgccagatagaatcagcatagaacaaccaggacgggctggcgttggtgccggtggtcaggttgataaatagattcgggtttgctctgcgcatattgtgcagcagagctattgacgcatcaaaatccgaggcgaacgggctaccctttatatgtgaactggcgttccccattccgtcgagtttaaacgaggtaatgtgttcatttttgataagattaatgatctgctcattgaagtttttaaagtagttcgctcccgaaagcgccagcttgccgtccacggtttcgaacccatactcttttgcatgcgaaacgcgaacgtcgctgcggcttattgtaacccccccacggtgaaagccatagcccaacggagctgtgcaggctatcggctttctctcgtactttgctaaaaccgttgctgaatgccgggccaaataaccagcgtccggtaagatcgtcccagccatcgtccagcagaaaagcgtctaacgccactccgcggccgctaatgaattccttgttccattcgtccatgcgtcccagaacatcctgttcggtgtacggagtgaaaaagccgatatccatccaactgttgtaatgcaaataaggcttgtacggacgtggacgtacggcattaataaactggttcacactgcgtcgcaactggctggtttccgggaaagtaccgaaccaggtggtaaagctaaccggcgtctctggctgaattggagttttcagttctacgttgagattggttgttgcttcataggcgtaggtattcacgatcggtttattcggcaggataaagaacgagtccgcaatgatcggtgagctagtgattgcgccgtctacgtaaggagcctgaaactgttttttggtcgggaagaaggtaatcttggcgacgtctcgtggttgcccaacggcggcaatagtgtagtcgatgctggcatattttcccttcacaaggttcaactgcactgttacgttaaaatctgggcgcgtaaagtcgatgacaatcgcattgtcctgttttttgatgtgcttgattttgaaatctgcggtgtggatttttgtctcatccggtagtgtcagaaagaacaattcctgtggtgtgatcggatggttagttctacggtccttcagcacaatcgtcgagtttgtatcatcaaacgagagggcaatattatcgttattgaacgtatagtttgctgctactgcactatgagacacacacagagccagtagtgagagagtgagcactttcttcattggtgtaagatccttatctgtaatgttactgcattcggttggtggatcgctccagccagtagcgctgagagccaaaattaatctgtaggtagttttcaccgttttgtacatagtggctgccgtcttctatgaccacgcctgcttgccgtgcgaaatgttgggttagctgcgttgcgctactctcatccgcgcttacgtctatccacgccagatacgacgattccggggtcatcatcttccacgccgggaagtgggtctggagggcatccgccagataccgggcgttgccttgcagataatcgttcagcgcgtcgagccagggcagaccgtgttgataggccagaatgattccccataccccgaacaaattgggcgaggtaatggagttcttctcaagctgctggcggaagcgctggcgcagcgagtcgtctggaatcatggagtaggaggttttcagcccgcccagctttaacgctttgttgggcgatgtgagcacgatcaggttgtcctgggcggcacagccagaggtgagacaactgacgaatttgccatccagaattgtgttcagcgtgaacctcatcgaccaccagaatcgtgccgtagcgttgacagagatcggacacctggcgtatttcttcctcgcgccagatcctgccggacgggttatgcggcgagcagaagaaccacagcgttggacggtaggttttgagctgttcttctatcagattaaaatcaagctgatagcggttttcctccacgcgcagcgggttagccagtacctgcacgccctggcgctgtgccgccatcgcaaaaggatcgtagaccggcgtgttcatcatcacgctgtcacccggtttgcagtacgcctgaatcgtgtagtgcagcgtggataccgtgccgtaggtcaacgtgatccacgatttttccacctcaacctgatgacgtttgcgctggaaggcgatgactgcgtcgtagaattcgtcaaagcaccaggtataaccaaaggtgccgtgctccacgatgcgccggaaaccgtcaatcaccgcaggcggtgaggtgaaatccatatcggctatccacagggggataaaggactccgggacgtcaccgaaacgcgagcaaacaaaggcatggtcccatttacggcacttatcactttgacgctcaatgattttgtcgaaatcaaacatcactcctcctgttaaattaaggcttcaatgccggttttgacgctctgtacctgcgctccgatgatcacctgcacgctatgcgcatcaagcatcga

SEQ ID NO: 701 - DNA, 1887 bp, Escherichia coli
atgaagaaagtgctcactctctcactactggctctgtgtgtgtctcatagtgcagtagcagcaaactatacgttcaataacgataatattgccctctcgtttgatgatacaaactcgacgattgtgctgaaggaccgtagaactaaccatccgatcacaccacaggaattgttctttctgacactaccggatgagacaaaaatccacaccgcagatttcaaaatcaagcacatcaaaaaacaggacaatgcgattgtcatcgactttacgcgcccagattttaacgtaacagtgcagttgaaccttgtgaagggaaaatatgccagcatcgactacactattgccgccgttgggcaaccacgagacgtcgccaagattaccttcttcccgaccaaaaaacagtttcaggctccttacgtagacggcgcaatcactagctcaccgatcattgcggactcgttctttatcctgccgaataaaccgatcgtgaatacctacgcctatgaagcaacaaccaatctcaacgtagaactgaaaactccaattcagccagagacgccggttagctttaccacctggttcggtactttcccggaaaccagccagttgcgacgcagtgtgaaccagtttattaatgccgtacgtccacgtccgtacaagccttatttgcattacaacagttggatggatatcggctttttcactccgtacaccgaacaggatgttctgggacgcatggacgaatggaacaaggaattcattagcggccgcggagtggcgttagacgcttttctgctggacgatggctgggacgatcttaccggacgctggttatttggcccggcattcagcaacggttttagcaaagtacgagagaaagccgatagcctgcacagctccgttgggctatggctttcaccgtgggggggttacaataagccgcagcgacgttcgcgtttcgcatgcaaaagagtatgggttcgaaaccgtggacggcaagctggcgctttcgggagcgaactacttaaaaacttcaatgagcagatcattaatcttatcaaaaatgaacacattacctcgtttaaactcgacggaatggggaacgccagttcacatataaagggtagcccgttcgcctcggattttgatgcgtcaatagctctgctgcacaatatgcgcagagcaaacccgaatctatttatcaacctgaccaccggcaccaacgccagcccgtcctggttgttctatgctgattctatctggcgtcagggggatgatataaacctgtatggccccggcacgccggtgcagcagtggataacatatcgtgatgccgagacataccgctctattgtacgtaaaggcccgctattcccgctgaactcgctgatgtaccacgggatagtcagcgccgagaatgcctattacgggttagagaaggtgcaaacggacagcgactttgccgatcaggtctggagctacttcgcgaccggcacccagctgcaggagctgtatattaccccgtccatgctgaacaaggtgaagtgggatacgctggcgaaggctgcaaaatggtcgaaggaaaatgccagcgtgctggttgatacccactggattggcggcgacccaacggcgcttgccgtgtacggctgggcatcctggagcaaagacaaagccattctcggtttgcgcaacccatcggataagccacagacctactatctggatttggcgaaggatttcgaaataccggcaggaaacgcggcgcagtttagtctgaaagcggtatacggcagcaataaaacagtgcccgttgagtataaaaacgcgacggtgattacgttgcagccgctggaaacgctggtgtttgaggcggtgaccattaac

SEQ ID NO: 702 - protein, 629 aa, Escherichia coli
MKKVLTLSLLALCVSHSAVAANYTFNNDNIALSFDDTNSTIVLKDRRTNHPITPQELFFLTLPDETKIHTADFKIKHIKKQDNAIVIDFTRPDFNVTVQLNLVKGKYASIDYTIAAVGQPRDVAKITFFPTKKQFQAPYVDGAITSSPIIADSFFILPNKPIVNTYAYEATTNLNVELKTPIQPETPVSFTTWFGTFPETSQLRRSVNQFINAVRPRPYKPYLHYNSWMDIGFFTPYTEQDVLGRMDEWNKEFISGRGVALDAFLLDDGWDDLTGRWLFGPAFSNGFSKVREKADSLHSSVGLWLSPWGGYNKPQRRSRFACKRVWVRNRGRQAGAFGSELLKNFNEQIINLIKNEHITSFKLDGMGNASSHIKGSPFASDFDASIALLHNMRRANPNLFINLTTGTNASPSWLFYADSIWRQGDDINLYGPGTPVQQWITYRDAETYRSIVRKGPLFPLNSLMYHGIVSAENAYYGLEKVQTDSDFADQVWSYFATGTQLQELYITPSMLNKVKWDTLAKAAKWSKENASVLVDTHWIGGDPTALAVYGWASWSKDKAILGLRNPSDKPQTYYLDLAKDFEIPAGNAAQFSLKAVYGSNKTVPVEYKNATVITLQPLETLVFEAVTIN

SEQ ID NO: 703 - DNA, 1167 bp, Escherichia coli
atgtttgatttcgacaaaatcattgagcgtcaaagtgataagtgccgtaaatgggaccatgcctttgtttgctcgcgtttcggtgacgtcccggagtcctttatccccctgtggatagccgatatggatttcacctcaccgcctgcggtgattgacggtttccggcgcatcgtggagcacggcacctttggttatacctggtgctttgacgaattctacgacgcagtcatcgccttccagcgcaaacgtcatcaggttgaggtggaaaaatcgtggatcacgttgacctacggcacggtatccacgctgcactacacgattcaggcgtactgcaaaccgggtgacagcgtgatgatgaacacgccggtctacgatccttttgcgatggcggcacagcgccagggcgtgcaggtactggctaacccgctgcgcgtggaggaaaaccgctatcagcttgattttaatctgatagaagaacagctcaaaacctaccgtccaacgctgtggttcttctgctcgccgcataacccgtccggcaggatctggcgcgaggaagaaatacgccaggtgtccgatctctgtcaacgctacggcacgattctggtggtcgatgaggttcacgctgaacacaattctggatggcaaattcgtcagttgtctcacctcacctctggctgtgccgcccaggacaacctgatcgtgctcacatcgcccaacaaagcgttaaagctgggcgggctgaaaacctcctactccatgattccagacgactcgctgcgccagcgcttccgccagcagcttgagaagaactccattacctcgcccaatttgttcggggtatggggaatcatttctggctatcaacacggtctgccctggctcgacgcgctgaacgattatctgcaaggcaacgcccggtatctggcggatgccctccagacccacttcccggcgtggaagatgatgaccccggaatcgtcgtatctggcgtggatagacgtaagcgcggatgagagtagcgcaacgcagctaacccaacatttcgcacggcaagcaggcgtggtcatagaagacggcagccactatgtacaaaacggtgaaaactacctacagattaattttggctctcagcgctactggctggagcgatccaccaaccgaatgcag

SEQ ID NO: 704 - protein, 389 aa, Escherichia coli
MFDFDKIIERQSDKCRKWDHAFVCSRFGDVPESFIPLWIADMDFTSPPAVIDGFRRIVEHGTFGYTWCFDEFYDAVIAFQRKRHQVEVEKSWITLTYGTVSTLHYTIQAYCKPGDSVMMNTPVYDPFAMAAQRQGVQVLANPLRVEENRYQLDFNLIEEQLKTYRPTLWFFCSPHNPSGRIWREEEIRQVSDLCQRYGTILVVDEVHAEHNSGWQIRQLSHLTSGCAAQDNLIVLTSPNKALKLGGLKTSYSMIPDDSLRQRFRQQLEKNSITSPNLFGVWGIISGYQHGLPWLDALNDYLQGNARYLADALQTHFPAWKMMTPESSYLAWIDVSADESSATQLTQHFARQAGVVIEDGSHYVQNGENYLQINFGSQRYWLERSTNRMQ

SEQ ID NO: 705 - DNA, 6164 bp, Escherichia coli
gctctgagagaggatcaagaagatgatgcagttataaagcaaggcaaacggttatcatgaatatatattcaattttaataagtaattaatttgcttgtgcaccagggctgtacgctttaccacacgtggtgcgacccaaacgatattgctgccagcaatcacgccaagaatttctggcaaagcatggaaatcaaggattcgcgctactgcccgaccatatccggcgacggtatggataaggataaattcaccattatgctcgacactcaggaccatttcagcgacggatcgacctgcgtcaggtgtgggaagtaattgaggattcaccgaataaattttttgtccttttgtatttctaatttttatgactcccagcaatttcagtagtcgtgaaacggttgactgactgatactgtcaaagccatggttttgcaaatcgcggcggatttcctcctgtgaaagataacttttttcggtaatcaggcgctgacagaccgccagttgcttcttttctttggcggagtaatcatcgtattccttcataatgcaccttttatttattattacctgatgatatttttcacattttataatgtgagagtggttcatttatcactacaccagatttgaaggccgctttgataagcggcctgtcgcgttaaatcatcgcggcgatactcagcacaatcatattcaacatcgtgagaatcagcagtagcggtgctacccatctcagataacggacccagggtacacgggcaatcgccagaccgcccatcactaccgcagaggttggcgtaatcaaattaaccaccccggaagcagactgataagcggtcaccaccagatcgcgttgtacatgagcaaaatcagcgagtggagccattattggcatcgttaacactgcaaggccggaagatgagggaaccagaaaagagagcaatacttccagccaataggtcacgttgatgaaaacagtggtggaaagccctgaaaccagattctcagcactgtgcagaattgtgtgcgtaatcatgccgttatccatcacgaccacaataccgcgggcgatgccgataatcagtgccacaccaaggagatcccgcgcgccgtcaataaaggtactggtgaaggtttcttcgcccatgcgggcaatgacacccacgatgaccgcagctgccagaaagacagcagagatttccgccatccaccaacccagtaccgctacgccgtaaatcataaaggcaaaggatgcagcaaaaagtatcaggatcgctttgcgcgtgggggtaaattccagcatcgtttctgaacgatttcccagaaaatgcgcctggttttcagccatcttatccgccacgatagagctttccggactgttgcgaactttgcgggcataacgcataacccagtaaacacaaatcacgtagcctactaacagcaaaataacacgcagcaaaatgccctgagtaaaggggatccctgcggcgttggcagcaatgacggtagcaaatgggttaatggttgagcccagcgtgccaatgcccgatcccaataacactgtggcggcagcgaccagaggatcaaagcgggcagccatcatgacgggcaccagcaacgtgtagaaggggagtgattcttccgccatcccataaatagtaccgccagcagcgaagagcgccatcaggatcggaatcatccactcttcccgaccattaaggcgagttgtcactcgttcgataccggcatctattgccccggttttatttactactcccaaaaatccaccgatgatcaggacaaacagcgcgacatcaatcgctcccgcagtgtaggtttgatggttgtacaagccgtcgatgggcgctaacaggacagccgtaataccctgtggttgtgcctcaacaggtgcgtaagtacctgcaacaggaacttcctttcccagtgcggcatttgtcaccatctgatattttcccgcaggtacaatccaggtcattgccgcaactaacgcaatcagcacgaacaagatggtataacggtgggaaatttgaatttacccataatgtgatctccataatcacgggcatacgccactcgtcgacgcatgcccgtcagggttagtcgccgagagttgctaccatcaccgctttaatggtgtgcatccggttttctgcttcatcgaaaacaatagagtgggccgattcaaaaacctcttcagtaacttccagtcctttgaggccgtaggccatctcgatctcgcgtcctactgtggtgtgctcattatggaaggcgggcaggcagtgcataaatttaacttcagggttacgcgtggcagtaatcacctgttgattgatctgataaggtgccatcagactcactcgttctgcccaggcttcttttggctctcccatcgaaacccaaacatccgtatagagaaaatcaacgtcgtatacgccttcttccacatcctctgtcagggtgattctcgccccagtcacgctggcgatctcacggcattgtgttaccagcgcttcatctggccagaaagatttaggtgccaccagacggatatccatccccatttttgcagcaccaaccatcagcgagttccccatgttatttcgggcatcaccaagatacgcaaagctcagctctggcagcgttttgcctggcgcatgttccagcatggtcattaaatccgcgaggatctgtgtcgggtgaaattcattggtcagtccgttccataccggaacaccagcgaactcacctaattcttcaacgatattctgaccataaccgcgatactcaataccgtcatacatgcgtccgagtacgcgagcggtatctttcattgattctttatggccgatttgtgagccgctggggccgatgtaagtcacctgcgcaccttgatcaaaggccgcgacttcaaaggcacagcgggtacgggtagaggatttttcaaaaatcaacgcaatgtttttaccgaccagcgtttgtttttcgtttccagatttcttggcggctttaagattgatagccaaatcaatcaggtattgaatctctgctggggtgtaatcaagcagcttaagaaaattacggtttttcagtgaagtagccatggggatgtccttataaaaatggatcaagcgtggttatggggggtatcaaggcgaataagagtgcctttgtctccggcgagaatttccggaccatctgcaagagagccgatccctgcaatgccccggcactgactaacaaactttgcgcaggcggtgactttcggccccatagacccggcatcaaactgcatttcgttgagtaattccggcgtgacctgtgccagcgggcgttgggttggcttgccccagtcgagatatactgcgtccgcatcagtgaggatcaacaaggcgtcagcatggatctgacttgccagtagcgcggctgaaagatctttgtcgataaccgcttcaatcccatggtatccatcggctttttcaaccaccggaacaccaccgccaccattacagatcaccagatgatcgtgggcgatcagtgtctggatggcatcccgctcgacgatgcgtttaggttgtggagaaggtacgacccggcggaaagagtgaccatctgctttgaaaacccagcctttttctgcctgtagtacctgagtctgagcgtggtcataaattgggccgatgtacttagttgggttactgaaggcgggatcgttggcatccacttcaacctgcgtcagcagcacgctgatttcacgttgtggtagttgatttttcagcgcctgttgtagcatgtagccgatcatcccctggctttcggcccccagaatgtcgagtggatagggagcgacatgggcataggcgctattttgaagtgccagaagtccaacttgtgggccattcccgtgaaccagtacaacccgccagtgttgagtcagttgggcgatagttttagccgcaagatcgatatttttacgttggatttctgcttcgagtggttcgcctcgtttaagcagggcattaccgccgagagcgataaccagtgttggtttgttttccatgatctcttccttagataccgtcacgatgcaaagggcaactcatgcaacgtgcgccgccacgtccgcggcctaattcatcaccggggatgggtaaaacggtgatgcctgctttgtcatatttttcgttagtccagatgttgcgctcgtagcccactaccactcccggccgaagcgtgagcacattgttagcgtcattccactgttcgcgttctgcctcaaaggcatcaccccccgtggtgattaaacgtacctggtcaataccgagggctttttcgatagcatggaggagtgtgctttcttgagtacgtttcaggccgccgtgaccgtcaggtgttagcgtccagcaattaacatccgggcgcacaacttcgggataaaccgagaaggtgtcgatatcgatatgagtcataacggtgtcaagatgcatacaggagcggtgtttaggcagctcaacagcgattacccgttcagcctgacgatgtttaaacaatgcctgagcaagaaactcgattccttgtggcgtggtgcgttcagacatgccgatcaacacggccccccgaccaatcaccagcacatcaccaccttctaacgtggcgtggtcataattaatattctcgtcgccgaaatatttaataaattcgccgccagcaaattgtggatgccagcgataaatagcgcgtagattattggtttcacgttggcgagcaggttttgccattggattaatcgatacaccgttataaatccagcatgaggtatcacgcgtaaataaatgattcggtaacggcttcataatgaaatcattaatatcgtgggtatcaaccaccatatttttaattgaggcgggaatttcactataagtcagcccaccacttaaatgacgagcaaggtcccggtgtgacatctctgcaagccaggtgcgaacgtcagtagcaaacgtagggccgagtcggtaatctgatatttgtgtttccagtaaccagcttttggcttccgggatatccaatgtttgtgttagtaaatcagtgagtaacagaacttctatcccttgctggcgcagcgtattggcgaaaatatcatgctcttcacctgcccgctcaacggacaatacatcgtcaaataacaactcctggcaattggatggtgttagacgtttcagactgagatttgggcgatgcaacataacgctgcgtagttgtccaatttcagaaccaacataatgcttttccatcattattcctttaacactttttcaaaaataaagaggagatggctgcaaacaaattaaatgcttgtagtcaggtctgttcagtaattttcagatgcaatgattcagtttatttcttccagaaaatgtgacgactttcacaccggcggtgatattaataatcgaagttaataatatttgatgcggttctgataaatgataaagaaacaaaatacgataatgcattaatacgcaaatatacgcatagttattcttcgttgttaattgattgttttatttttcaggaaatgcctttaagtataatgcattgatatttatgtatattttaatattcattgcatatctatgcgaaaggataaggtgattatttttcacagcactattttcacgggataactatgacagcacgggcattaaaagctaagaaaatgaactgtgatctgactgagagttttcttttaacatatgcaataacaagatattaggaccaaaatacatagctaagttataagatttatgcagcaaaactgcatacaaaattactcctgcttaacatcagtacaacatctccagcaataaacatgcgcaagggcaaaacctgatgatttttctatggtgagaggtggctttttttcgtataaggaaagaagtgaaacattgttttaataaaggaagatattatgattgttggcaacatccatcacttacaatcctggctgccggaagaacttcgcgaagcaattgagtacatcaaatcacatgtcagcgatgagacagcaaaaggtaagcacgctattgacggcgaccgcctgttttatctgatttctgaggatacgactgaaccaggtgaactgcgtc

SEQ ID NO: 706 - DNA, 486 bp, Escherichia coli
atgaaggaatacgatgattactccgccaaagaaaagaagcaactggcggtctgtcagcgcctgattaccgaaaaaagttatctttcacaggaggaaatccgccgcgatttgcaaaaccatggctttgacagtatcagtcagtcaaccgtttcacgactactgaaattgctgggagtcataaaaattagaaatacaaaaggacaaaaaatttattcggtgaatcctcaattacttcccacacctgacgcaggtcgatccgtcgctgaaatggtcctgagtgtcgagcataatggtgaatttatccttatccataccgtcgccggatatggtcgggcagtagcgcgaatccttgatttccatgctttgccagaaattcttggcgtgattgctggcagcaatatcgtttgggtcgcaccacgtgtggtaaagcgtacagccctggtgcacaagcaaattaattacttattaaaattgaatatatattca

SEQ ID NO: 707 - protein, 184 aa, Escherichia coli
MNHSHIIKCEKYHQVIINKRCIMKEYDDYSAKEKKQLAVCQRLITEKSYLSQEEIRRDLQNHGFDSISQSTVSRLLKLLGVIKIRNTKGQKIYSVNPQLLPTPDAGRSVAEMVLSVEHNGEFILIHTVAGYGRAVARILDFHALPEILGVIAGSNIVWVAPRVVKRTALVHKQINYLLKLNIYS

SEQ ID NO: 708 - DNA, 1392 bp, Escherichia coli
attcaaatttcccaccgttataccatcttgttcgtgctgattgcgttagttgcggcaatgacctggattgtacctgcgggaaaatatcagatggtgacaaatgccgcactgggaaaggaagttcctgttgcaggtacttacgcacctgttgaggcacaaccacagggtattacggctgtcctgttagcgcccatcgacggcttgtacaaccatcaaacctacactgcgggagcgattgatgtcgcgctgtttgtcctgatcatcggtggatttttgggagtagtaaataaaaccggggcaatagatgccggtatcgaacgagtgacaactcgccttaatggtcgggaagagtggatgattccgatcctgatggcgctcttcgctgctggcggtactatttatgggatggcggaagaatcactccccttctacacgttgctggtgcccgtcatgatggctgcccgctttgatcctctggtcgctgccgccacagtgttattgggatcgggcattggcacgctgggctcaaccattaacccatttgctaccgtcattgctgccaacgccgcagggatcccctttactcagggcattttgctgcgtgttattttgctgttagtaggctacgtgatttgtgtttactgggttatgcgttatgcccgcaaagttcgcaacagtccggaaagctctatcgtggcggataagatggctgaaaaccaggcgcattttctgggaaatcgttcagaaacgatgctggaatttacccccacgcgcaaagcgatcctgatactttttgctgcatcctttgcctttatgatttacggcgtagcggtactgggttggtggatggcggaaatctctgctgtctttctggcagctgcggtcatcgtgggtgtcattgcccgcatgggcgaagaaaccttcaccagtacctttattgacggcgcgcgggatctccttggtgtggcactgattatcggcatcgcccgcggtattgtggtcgtgatggataacggcatgattacgcacacaattctgcacagtgctgagaatctggtttcagggctttccaccactgttttcatcaacgtgacctattggctggaagtattgctctcttttctggttccctcatcttccggccttgcagtgttaacgatgccaataatggctccactcgctgattttgctcatgtacaacgcgatctggtggtgaccgcttatcagtctgcttccggggtggttaatttgattacgccaacctctgcggtagtgatgggcggtctggcgattgcccgtgtaccctgggtccgttatctgagatgggtagcaccgctactgctgattctcacgatgttgaatatgattgtgctgagtatcgccgcgatgatt

SEQ ID NO: 709 - protein, 464 aa, Escherichia coli
IQISHRYTILFVLIALVAAMTWIVPAGKYQMVTNAALGKEVPVAGTYAPVEAQPQGITAVLLAPIDGLYNHQTYTAGAIDVALFVLIIGGFLGVVNKTGAIDAGIERVTTRLNGREEWMIPILMALFAAGGTIYGMAEESLPFYTLLVPVMMAARFDPLVAAATVLLGSGIGTLGSTINPFATVIAANAAGIPFTQGILLRVILLLVGYVICVYWVMRYARKVRNSPESSIVADKMAENQAHFLGNRSETMLEFTPTRKAILILFAASFAFMIYGVAVLGWWMAEISAVFLAAAVIVGVIARMGEETFTSTFIDGARDLLGVALIIGIARGIVVVMDNGMITHTILHSAENLVSGLSTTVFINVTYWLEVLLSFLVPSSSGLAVLTMPIMAPLADFAHVQRDLVVTAYQSASGVVNLITPTSAVVMGGLAIARVPWVRYLRWVAPLLLILTMLNMIVLSIAAMI

SEQ ID NO: 710 - DNA, 1002 bp, Escherichia coli
atggctacttcactgaaaaaccgtaattttcttaagctgcttgattacaccccagcagagattcaatacctgattgatttggctatcaatcttaaagccgccaagaaatctggaaacgaaaaacaaacgctggtcggtaaaaacattgcgttgatttttgaaaaatcctctacccgtacccgctgtgcctttgaagtcgcggcctttgatcaaggtgcgcaggtgacttacatcggccccagcggctcacaaatcggccataaagaatcaatgaaagataccgctcgcgtactcggacgcatgtatgacggtattgagtatcgcggttatggtcagaatatcgttgaagaattaggtgagttcgctggtgttccggtatggaacggactgaccaatgaatttcacccgacacagatcctcgcggatttaatgaccatgctggaacatgcgccaggcaaaacgctgccagagctgagctttgcgtatcttggtgatgcccgaaataacatggggaactcgctgatggttggtgctgcaaaaatggggatggatatccgtctggtggcacctaaatctttctggccagatgaagcgctggtaacacaatgccgtgagatcgccagcgtgactggggcgagaatcaccctgacagaggatgtggaagaaggcgtatacgacgttgattttctctatacggatgtttgggtttcgatgggagagccaaaagaagcctgggcagaacgagtgagtctgatggcaccttatcagatcaatcaacaggtgattactgccacgcgtaaccctgaagttaaatttatgcactgcctgcccgccttccataatgagcacaccacagtaggacgcgagatcgagatggcctacggcctcaaaggactggaagttactgaagaggtttttgaatcggcccactctattgttttcgatgaagcagaaaaccggatgcacaccattaaagcggtgatggtagcaactctcggcgac

SEQ ID NO: 711 - protein, 343 aa, Escherichia coli
LIHFYKDIPMATSLKNRNFLKLLDYTPAEIQYLIDLAINLKAAKKSGNEKQTLVGKNIALIFEKSSTRTRCAFEVAAFDQGAQVTYIGPSGSQIGHKESMKDTARVLGRMYDGIEYRGYGQNIVEELGEFAGVPVWNGLTNEFHPTQILADLMTMLEHAPGKTLPELSFAYLGDARNNMGNSLMVGAAKMGMDIRLVAPKSFWPDEALVTQCREIASVTGARITLTEDVEEGVYDVDFLYTDVWVSMGEPKEAWAERVSLMAPYQINQQVITATRNPEVKFMHCLPAFHNEHTTVGREIEMAYGLKGLEVTEEVFESAHSIVFDEAENRMHTIKAVMVATLGD

SEQ ID NO: 712 - DNA, 930 bp, Escherichia coli
atggaaaacaaaccaacactggttatcgctctcggcggtaatgccctgcttaaacgaggcgaaccactcgaagcagaaatccaacgtaaaaatatcgatcttgcggctaaaactatcgcccaactgactcaacactggcgggttgtactggttcacgggaatggcccacaagttggacttctggcacttcaaaatagcgcctatgcccatgtcgctccctatccactcgacattctgggggccgaaagccaggggatgatcggctacatgctacaacaggcgctgaaaaatcaactaccacaacgtgaaatcagcgtgctgctgacgcaggttgaagtggatgccaacgatcccgccttcagtaacccaactaagtacatcggcccaatttatgaccacgctcagactcaggtactacaggcagaaaaaggctgggttttcaaagcagatggtcactctttccgccgggtcgtaccttctccacaacctaaacgcatcgtcgagcgggatgccatccagacactgatcgcccacgatcatctggtgatctgtaatggtggcggtggtgttccggtggttgaaaaagccgatggataccatgggattgaagcggttatcgacaaagatctttcagccgcgctactggcaagtcagatccatgctgacgccttgttgatcctcactgatgcggacgcagtatatctcgactggggcaagccaacccaacgcccgctggcacaggtcacgccggaattactcaacgaaatgcagtttgatgccgggtctatggggccgaaagtcaccgcctgcgcaaagtttgttagtcagtgccggggcattgcagggatcggctctcttgcagatggtccggaaattctcgccggagacaaaggcactcttattcgccttgataccccccataaccacgct

SEQ ID NO: 713 - protein, 318 aa, Escherichia coli
VTVSKEEIMENKPTLVIALGGNALLKRGEPLEAEIQRKNIDLAAKTIAQLTQHWRVVLVHGNGPQVGLLALQNSAYAHVAPYPLDILGAESQGMIGYMLQQALKNQLPQREISVLLTQVEVDANDPAFSNPTKYIGPIYDHAQTQVLQAEKGWVFKADGHSFRRVVPSPQPKRIVERDAIQTLIAHDHLVICNGGGGVPVVEKADGYHGIEAVIDKDLSAALLASQIHADALLILTDADAVYLDWGKPTQRPLAQVTPELLNEMQFDAGSMGPKVTACAKFVSQCRGIAGIGSLADGPEILAGDKGTLIRLDTPHNHA

SEQ ID NO: 714 - DNA, 1218 bp, Escherichia coli
atggaaaagcattatgttggttctgaaattggacaactacgcagcgttatgttgcatcgcccaaatctcagtctgaaacgtctaacaccatccaattgccaggagttgttatttgacgatgtattgtccgttgagcgggcaggtgaagagcatgatattttcgccaatacgctgcgccagcaagggatagaagttctgttactcactgatttactaacacaaacattggatatcccggaagccaaaagctggttactggaaacacaaatatcagattaccgactcggccctacgtttgctactgacgttcgcacctggcttgcagagatgtcacaccgggaccttgctcgtcatttaagtggtgggctgacttatagtgaaattcccgcctcaattaaaaatatggtggttgatacccacgatattaatgatttcattatgaagccgttaccgaatcatttatttacgcgtgatacctcatgctggatttataacggtgtatcgattaatccaatggcaaaacctgctcgccaacgtgaaaccaataatctacgcgctatttatcgctggcatccacaatttgctggcggcgaatttattaaatatttcggcgacgagaatattaattatgaccacgccacgttagaaggtggtgatgtgctggtgattggtcggggggccgtgttgatcggcatgtctgaacgcaccacgccacaaggaatcgagtttcttgctcaggcattgtttaaacatcgtcaggctgaacgggtaatcgctgttgagctgcctaaacaccgctcctgtatgcatcttgacaccgttatgactcatatcgatatcgacaccttctcggtttatcccgaagttgtgcgcccggatgttaattgctggacgctaacacctgacggtcacggcggcctgaaacgtactcaagaaagcacactcctccatgctatcgaaaaagccctcggtattgaccaggtacgtttaatcaccacggggggtgatgcctttgaggcagaacgcgaacagtggaatgacgctaacaatgtgctcacgcttcggccgggagtggtagtgggctacgagcgcaacatctggactaacgaaaaatatgacaaagcaggcatcaccgttttacccatccccggtgatgaattaggccgcggacgtggcggcgcacgttgcatgagttgccctttgcatcgtgacggtatc

SEQ ID NO: 715 - protein, 406 aa, Escherichia coli
MEKHYVGSEIGQLRSVMLHRPNLSLKRLTPSNCQELLFDDVLSVERAGEEHDIFANTLRQQGIEVLLLTDLLTQTLDIPEAKSWLLETQISDYRLGPTFATDVRTWLAEMSHRDLARHLSGGLTYSEIPASIKNMVVDTHDINDFIMKPLPNHLFTRDTSCWIYNGVSINPMAKPARQRETNNLRAIYRWHPQFAGGEFIKYFGDENINYDHATLEGGDVLVIGRGAVLIGMSERTTPQGIEFLAQALFKHRQAERVIAVELPKHRSCMHLDTVMTHIDIDTFSVYPEVVRPDVNCWTLTPDGHGGLKRTQESTLLHAIEKALGIDQVRLITTGGDAFEAEREQWNDANNVLTLRPGVVVGYERNIWTNEKYDKAGITVLPIPGDELGRGRGGARCMSCPLHRDGI

SEQ ID NO: 716 - DNA, 1477 bp, Escherichia coli
cgacggtaagtttgcgcaaacggagtgcgggagaagcgacaacattcatagcatagctcaatttcaaatgtatgatttatagctcactttaataccaccctcgcttaggtggtgcaagaagaagataaatcagaaaatattacgcatatctctctgagataaagcgtattctaggcgaaccagtatcaattgactggaattattatcggtatgaatggaatttattttagggatatagttcatgaatgatgtaaacatcgggaaagataattctcggcactcgtttgttttcacaggcaaaggtggtgagtattttcttatttgtcttgtgaattttttactgacaattattactctgggaatatatggaccgtgggcattgataaaatgccgtcgttatatttatcaacatgtgacactcaaggggcaaccatttagttataagggaacaggtggtgccatttttgttagcatgttacttattgtggtggtttatcttctcagtatttcttgttttgcaggtcaacactttgcgctcggtttattcctgtttgctctcttgatctgcggtattccttgtatggcagtgaagagtctgcagtatcaggcgaacatgacctcactgaatgacattcgctttggctttaactgctcaatgatgcgtgcatggtggggttatgctaggactgcctgttctgttggcgttagttttttggttcgcactgtatcttattgcgcaagtgacgacatcgataggaggcttattctttaacttagtcgcattaagtttgctttctgccatcgggctaggtgttgtccatggtataacctatagtaaatggatgccattgctgggtaataatgcaacttttggcattcataagttttctattcaggtaaacgtaaaagaatgcattaaaggttgcatgctcgcaatattaaccatggttcctttcatcattgtgattggtattatgatcgcaccagtattccagcagttaatgatgatgaccatgttgggtgggtctgatgctggcagtgagtttgtattacaatattacccgcagattatggcttcttatttcctgtattttgtcgcgatccttgtttttgccagttatctctatgtcacgttacgcaatctgtttttgaataatctgacgctggcaaatgggacaattcgttttcattcatctgttaccgcgatcggtatgcttctgcgcatgttggcggtattaatggggtcctcaattacctgtggtctggcttatccctggctgaaaatgtggatggttagctggattgctaacaatacccatgtccagggcgaccttgattcgctggagttaaccaatgatgacaaaccgcaggatagcggttcgttaatgtggatatctcgcggtattatgccgtatgttccgtttatctaaataaaaaggccggagcatgctccggccttcgttttcactatgagtat

SEQ ID NO: 717 - DNA, 1185 bp, Escherichia coli
atgaatgatgtaaacatcgggaaagataattctcggcactcgtttgttttcacaggcaaaggtggtgagtattttcttatttgtcttgtgaattttttactgacaattattactctgggaatatatggaccgtgggcattgataaaatgccgtcgttatatttatcaacatgtgacactcaaggggcaaccatttagttataagggaacaggtggtgccatttttgttagcatgttacttattgtggtggtttatcttctcagtatttcttgttttgcaggtcaacactttgcgctcggtttattcctgtttgctctcttgatctgcggtattccttgtatggcagtgaagagtctgcagtatcaggcgaacatgacctcactgaatgacattcgctttggctttaactgctcaatgatgcgtgcatggtggggtatgctaggactgcctgttctgttggcgttagttttttggttcgcactgtatcttattgcgcaagtgacgacatcgataggaggcttattctttaacttagtcgcattaagtttgctttctgccatcgggctaggtgttgtccatggtataacctatagtaaatggatgccattgctgggtaataatgcaacttttggcattcataagttttctattcaggtaaacgtaaaagaatgcattaaaggttgcatgctcgcaatattaaccatggttcctttcatcattgtgattggtattatgatcgcaccagtattccagcagttaatgatgatgaccatgttgggtgggtctgatgctggcagtgagtttgtattacaatattacccgcagattatggcttcttatttcctgtattttgtcgcgatccttgtttttgccagttatctctatgtcacgttacgcaatctgtttttgaataatctgacgctggcaaatgggacaattcgttttcattcatctgttaccgcgatcggtatgcttctgcgcatgttggcggtattaatggggtcctcaattacctgtggtctggcttatccctggctgaaaatgtggatggttagctggattgctaacaatacccatgtccagggcgaccttgattcgctggagttaaccaatgatgacaaaccgcaggatagcggttcgttaatgtggatatctcgcggtattatgccgtatgttccgtttatc

SEQ ID NO: 718 - protein, 395 aa, Escherichia coli
MNDVNIGKDNSRHSFVFTGKGGEYFLICLVNFLLTIITLGIYGPWALIKCRRYIYQHVTLKGQPFSYKGTGGAIFVSMLLIVVVYLLSISCFAGQHFALGLFLFALLICGIPCMAVKSLQYQANMTSLNDIRFGFNCSMMRAWWGMLGLPVLLALVFWFALYLIAQVTTSIGGLFFNLVALSLLSAIGLGVVHGITYSKWMPLLGNNATFGIHKFSIQVNVKECIKGCMLAILTMVPFIIVIGIMIAPVFQQLMMMTMLGGSDAGSEFVLQYYPQIMASYFLYFVAILVFASYLYVTLRNLFLNNLTLANGTIRFHSSVTAIGMLLRMLAVLMGSSITCGLAYPWLKMWMVSWIANNTHVQGDLDSLELTNDDKPQDSGSLMWISRGIMPYVPFI

SEQ ID NO: 719 - DNA, 5585 bp, Escherichia coli
aggtgacaaacttgcatctggagttgtgaaagctgtttataattccgcaacagcaggctgggaagaatcaatcgcggtccaggggagcatcggtggatttgattatcgcatcaacggtagttattctgatcagggcaatcgtgatacgccggatggacgtctgccgaataccaactatcgtaacaatagtcagggtgtatggttgggttataactccggaaaccatcgttttggcctctcgcttgatcgctacagactcgcgacgcaaacttactatgaggatccagacggaagctatgaggcatttagtgtcaaaatacctaaacttgaacgagagaaagttggggtattctatgacacagacgtggacggtgactatctaaaaaaaattcatttcgacgcgtatgagcagaccatccagcgccaatttgccaacgaagtaaaaacgacacagcctgttcccagtccgatgattcaggctctgaccgttcataacaagactgacacccatgataagcaatacactcaggcggtcacattgcagagtcacttttcgctgcctgctaataatgaacttgttaccggtgcacagtacaaacaagacagggtcagccaaaggtccggtggcatgacctcaagcaaatctctgaccggcttcattaataaggaaacacgaactcgctcctattatgagtcagagcaaagtacagtctcactattcgcacaaaatgactggcgattcgccgatcactggacatggacaatgggagttcgccaatactggctttcttcaaagttgacgcgtggtgacggagtatcatataccgcaggcattataagcgatacctctcttgccagagagtctgcgagtgatcacgaaatggtaacatctacaagcctgcgctattcaggtttcgataacttggagttacgcgctgcgttcgcgcaaggctacgtatttcccacactctcccagctttttatgcagacatctgcgggcggcagtgtcacatacggaaatcctgatcttaaggctgaacactccaataactttgaattaggtgcacgatataatggtaatcagtggctgattgacagcgcagtttactactcagaagctaaagattatattgcaagtctgatctgtgatggcagtatagtttgcaatggtaacaccaactcctcccgtagtagctactattattatgacaatattgatcgggcaaaaacatggggactggaaataagcgcggaatataatggctgggttttctcgccatatatcagtggcaatttaattcgtcggcaatatgaaacttcaacattaaaaacaactaatacaggagaaccagcgataaacggacgtatagggctgaaacatactcttgtgatgggtcaggccaacataatctctgatgtttttattcgtgctgcctctagtgcaaaagatgacagtaacggtaccgaaacaaatgttccgggctgggccactctcaactttgcagtaaatacagaattcggtaacgaggatcagtaccggattaacctagcactcaataacctgacagacaaacgctaccgtacagcacatgaaactattcctgcagcaggttttaatgcagctataggttttgtatggaatttctgatgacaaaaacaatcgttatggaattctttgtcctgatctgcccgctttgcgggcaggctaacgaacgtattgtgtttgttgaaggtttttcgacgttgttttccatctgggggtgaatatttattcttcccgccagcatgactctatagtcattgctacgacaatgacttataaagctggttactgagcctatacctttgtaattcaaaagtgatatcagttcacaacgcaatactatttttagattatttactctcacccagatactgaatcaatggataataccttttgatttatcccgactcggaagaaggtgggataaatattctccttctattgccccttactccaactatcatattttacaatatcaacgaaccgtccatgaagggctgaaattctcttcctgaaacagctctgtcagcccgctaatctgtttcagcctcagcacttcatcctggtccatgcccaactctgtgccaatacgctcatctgtccagcccagacgcgaaaggtccctgacaatgtcagacattgacgttatctggtgttttcccctggcacggttatgccgtatggttgcggcaatacgtgatgcctgtccctttctttccggattaatacaggtcactggcagccagcccttcagacgttttctcgtatccgctttcctgcccagcaactgacgatgaaaaccatccacgaccagataatgctccttctcttccgaaaccaccacaggctgcgtgaatccatcctgctccagtgaatgtttaagcagttttttttcactggaagacatgacattgggattgtaatcgttggccaccacctcatccgctttcacccacaacacacagtccacaggctcctgtgcaaaagggctgacctcatgcaacaccctgcgcagatgattaagggctcgtatggtctcttcttcagatcgttcctgactgaagtactgtcgaatcatgttgctcaatacttccacctcaggtgtcacagaatcccccattccttcctcctttctttcatacgctgcagataacgttcatagtgccggggtttgttcggactgaaggagagggtccggcaccagaaatcattctttatgagtgtcttacagatacgtcgccaagacgggatatcccggctccccaggtcattctcctgttcatccgggatgtcatccgggaagccccgcgtctgataccagcgcaggtagacagcaattttattacggtaatgttctgccgttctttccggcatcacatccagcaggaacatcgcatagctacgccaggtatgatgaggcggcttcgtgatacgcttacgcagggcaaaataggcaccgctctcattggcataaagcgccccgctggcagcacccgacacccgctcacacatcctggcccaagtttccggctccagaacatggtaaagccacagtcccttacgctgttccgggccaaaaggctcacagacccgcatgttgcgtaacggcacgccggcacggtacatcaggtcatacaggggattgtagatagctcgggttctggcgttatatatccatatatcacgggctttccagtcatacaacggatacaaggtgtaataaaacccttcaggtgacgctgtggtccagggtttatcatctgcatatctcagtttgcgctgagacaccagtcccataaagcgattgagcgattcatcagcacgaacaccagtcagtattgccactccacaccggttaccggcaaaccaggaagaaaatgccggaacaaattcttcaaacgtcatggcataccgataaaatgggaaatacgacatatctgtaatagcgtcatctggtggctgacgaacccactccacacctggttcccagcatatccattccggctgaaactgagagacaccgtttaccgtagtcagggggagtgccacccagtaaaaagtctccgtcacatcccgatacatctccctcatcttcagaatgtgtgcaattgtgcactggtactgagcttcccagtcaatgaataatacagagaaacgacgtttcttcctgcgagccacatcggccgtaagatggagcagcacagtagagtcttttcctccagaaaaagacaaacaaacagatgaaaatgtctcaaacaaccactcaatacggtgaatggccgcatgtaatacattaacatctgttcttatcttctgtatggttcccatacatatcctagtataaactatcttggcagtaatattctgaactacaaacttaaaccttctcatcaagaaaaagttctaccttaagggtatattgttactatcacgagttcatgatagttaagtttttagtaaaacacgacatatgacgatacatatattagcaaaattatgacaaatgaggctaccttaacaaaaattcattaatagcaaacacataaataaagactctcctaccaaaaaaacagactcttcactccttcttaactattttcatgagaaataataaacaaggaatttattacctttgaatacaaacttatatatacaatgaacttaaactcttgaatcattatccagagaatatcattaattggtgatgacctagctatgcatggcagcattcatgataatgagtatatactagccagaatgacacaaagagatatttaactaactaatatattgatagtcaatgatgacagatcgtagtaatatattaatacttagccctctgaaatatcaagtcatgtacgatgctcccgttattttaatttcgttctagctgtacttttgaatacaaccataactgattattgccaactgactgaatgaaaaatatcaataaatacaacaaacttactgccttttcgttttatttataagacgttccaactacaagaacaatataggcacatgattattccaacaatactggacaaaaactcccgtatctgaagatacaataggtgataattctttcaggattttgctcaactatggcctgatgggagagtcatgacggaactaaggcctttacaagccagaagattagtcttaatgcgatcacagttcaacttgctacgactgaaatccgtaatagcatataaactctgtttttttaacagaaatgaagatcttcttgttgcataaatgatgcttctctgcctctgaaaaagtaaatataaagtatatttaataagattaatttttatgatagtgataatttatgatggggattcatatggcatatctaaaaggatagattacatgttgaattctacaacatcttcgggaaaaagaaccggcattttagcaattggtgcccatcctgatgatatagaattaggatgtggtgcatctctttcatattattctaatgaaaaagtatatattatatctgttgtcatgacacctggttgctgtggcgcagagtatattgatcgtcacaaggaatcacaagaagcattaaatatgttaggatgcaataaactaatccctctaaattttgaagataccagattatatttgcaaataaaagagatgatatcatctctggaatacataattgagaatgaaacgccccaggatgtggaaattactcgagtttacaccatgaataatactgacaggcatcaggatcacattgctgtttatcaggcatcaatggttgcctgtcgttatattcctcaaatactaggatacgaaacaccaagtacatgtctgtcatttttacctcaagtttttgaatctgtagatgaggtccattttaataaaaaaatattagcattacaaaagcataaaagccagatccatcgaagatacatacagccagaatacataattgctcaagccaaattccgaggacaacaggttagtcattctatgtgtgaaggttttgttgtccataagatggtgttgtaacggagtaatagaa

SEQ ID NO: 720 - DNA, 1620 bp, Escherichia coli
gtgaaagctgtttataattccgcaacagcaggctgggaagaatcaatcgcggtccaggggagcatcggtggatttgattatcgcatcaacggtagttattctgatcagggcaatcgtgatacgccggatggacgtctgccgaataccaactatcgtaacaatagtcagggtgtatggttgggttataactccggaaaccatcgttttggcctctcgcttgatcgctacagactcgcgacgcaaacttactatgaggatccagacggaagctatgaggcatttagtgtcaaaatacctaaacttgaacgagagaaagttggggtattctatgacacagacgtggacggtgactatctaaaaaaaattcatttcgacgcgtatgagcagaccatccagcgccaatttgccaacgaagtaaaaacgacacagcctgttcccagtccgatgattcaggctctgaccgttcataacaagactgacacccatgataagcaatacactcaggcggtcacattgcagagtcacttttcgctgcctgctaataatgaacttgttaccggtgcacagtacaaacaagacagggtcagccaaaggtccggtggcatgacctcaagcaaatctctgaccggcttcattaataaggaaacacgaactcgctcctattatgagtcagagcaaagtacagtctcactattcgcacaaaatgactggcgattcgccgatcactggacatggacaatgggagttcgccaatactggctttcttcaaagttgacgcgtggtgacggagtatcatataccgcaggcattataagcgatacctctcttgccagagagtctgcgagtgatcacgaaatggtaacatctacaagcctgcgctattcaggtttcgataacttggagttacgcgctgcgttcgcgcaaggctacgtatttcccacactctcccagctttttatgcagacatctgcgggcggcagtgtcacatacggaaatcctgatcttaaggctgaacactccaataactttgaattaggtgcacgatataatggtaatcagtggctgattgacagcgcagtttactactcagaagctaaagattatattgcaagtctgatctgtgatggcagtatagtttgcaatggtaacaccaactcctcccgtagtagctactattattatgacaatattgatcgggcaaaaacatggggactggaaataagcgcggaatataatggctgggttttctcgccatatatcagtggcaatttaattcgtcggcaatatgaaacttcaacattaaaaacaactaatacaggagaaccagcgataaacggacgtatagggctgaaacatactcttgtgatgggtcaggccaacataatctctgatgtttttattcgtgctgcctctagtgcaaaagatgacagtaacggtaccgaaacaaatgttccgggctgggccactctcaactttgcagtaaatacagaattcggtaacgaggatcagtaccggattaacctagcactcaataacctgacagacaaacgctaccgtacagcacatgaaactattcctgcagcaggttttaatgcagctataggttttgtatggaatttc

SEQ ID NO: 721 - protein, 540 aa, Escherichia coli
VKAVYNSATAGWEESIAVQGSIGGFDYRINGSYSDQGNRDTPDGRLPNTNYRNNSQGVWLGYNSGNHRFGLSLDRYRLATQTYYEDPDGSYEAFSVKIPKLEREKVGVFYDTDVDGDYLKKIHFDAYEQTIQRQFANEVKTTQPVPSPMIQALTVHNKTDTHDKQYTQAVTLQSHFSLPANNELVTGAQYKQDRVSQRSGGMTSSKSLTGFINKETRTRSYYESEQSTVSLFAQNDWRFADHWTWTMGVRQYWLSSKLTRGDGVSYTAGIISDTSLARESASDHEMVTSTSLRYSGFDNLELRAAFAQGYVFPTLSQLFMQTSAGGSVTYGNPDLKAEHSNNFELGARYNGNQWLIDSAVYYSEAKDYIASLICDGSIVCNGNTNSSRSSYYYYDNIDRAKTWGLEISAEYNGWVFSPYISGNLIRRQYETSTLKTTNTGEPAINGRIGLKHTLVMGQANIISDVFIRAASSAKDDSNGTETNVPGWATLNFAVNTEFGNEDQYRINLALNNLTDKRYRTAHETIPAAGFNAAIGFVWNF

SEQ ID NO: 722 - DNA, 642 bp, Escherichia coli
atgggggattctgtgacacctgaggtggaagtattgagcaacatgattcgacagtacttcagtcaggaacgatctgaagaagagaccatacgagcccttaatcatctgcgcagggtgttgcatgaggtcagcccttttgcacaggagcctgtggactgtgtgttgtgggtgaaagcggatgaggtggtggccaacgattacaatcccaatgtcatgtcttccagtgaaaaaaaactgcttaaacattcactggagcaggatggattcacgcagcctgtggtggtttcggaagagaaggagcattatctggtcgtggatggttttcatcgtcagttgctgggcaggaaagcggatacgagaaaacgtctgaagggctggctgccagtgacctgtattaatccggaaagaaagggacaggcatcacgtattgccgcaaccatacggcataaccgtgccaggggaaaacaccagataacgtcaatgtctgacattgtcagggacctttcgcgtctgggctggacagatgagcgtattggcacagagttgggcatggaccaggatgaagtgctgaggctgaaacagattagcgggctgacagagctgtttcaggaagagaatttcagcccttcatggacggttcgt

SEQ ID NO: 723 - protein, 214 aa, Escherichia coli
MGDSVTPEVEVLSNMIRQYFSQERSEEETIRALNHLRRVLHEVSPFAQEPVDCVLWVKADEVVANDYNPNVMSSSEKKLLKHSLEQDGFTQPVVVSEEKEHYLVVDGFHRQLLGRKADTRKRLKGWLPVTCINPERKGQASRIAATIRHNRARGKHQITSMSDIVRDLSRLGWTDERIGTELGMDQDEVLRLKQISGLTELFQEENFSPSWTVR

SEQ ID NO: 724 - DNA, 1221 bp, Escherichia coli
atgggaaccatacagaagataagaacagatgttaatgtattacatgcggccattcaccgtattgagtggttgtttgagacattttcatctgtttgtttgtctttttctggaggaaaagactctactgtgctgctccatcttacggccgatgtggctcgcaggaagaaacgtcgtttctctgtattattcattgactgggaagctcagtaccagtgcacaattgcacacattctgaagatgagggagatgtatcgggatgtgacggagactttttactgggtggcactccccctgactacggtaaacggtgtctctcagtttcagccggaatggatatgctgggaaccaggtgtggagtgggttcgtcagccaccagatgacgctattacagatatgtcgtatttcccattttatcggtatgccatgacgtttgaagaatttgttccggcattttcttcctggtttgccggtaaccggtgtggagtggcaatactgactggtgttcgtgctgatgaatcgctcaatcgctttatgggactggtgtctcagcgcaaactgagatatgcagatgataaaccctggaccacagcgtcacctgaagggttttattacaccttgtatccgttgtatgactggaaagcccgtgatatatggatatataacgccagaacccgagctatctacaatcccctgtatgacctgatgtaccgtgccggcgtgccgttacgcaacatgcgggtctgtgagccttttggcccggaacagcgtaagggactgtggctttaccatgttctggagccggaaacttgggccaggatgtgtgagcgggtgtcgggtgctgccagcggggcgctttatgccaatgagagcggtgcctattttgccctgcgtaagcgtatcacgaagccgcctcatcatacctggcgtagctatgcgatgttcctgctggatgtgatgccggaaagaacggcagaacattaccgtaataaaattgctgtctacctgcgctggtatcagacgcggggcttcccggatgacatcccggatgaacaggagaatgacctggggagccgggatatcccgtcttggcgacgtatctgtaagacactcataaagaatgatttctggtgccggaccctctccttcagtccgaacaaaccccggcactatgaacgttatctgcagcgtatgaaagaaaggaggaaggaatgggggattctg

SEQ ID NO: 725 - protein, 407 aa, Escherichia coli
MGTIQKIRTDVNVLHAAIHRIEWLFETFSSVCLSFSGGKDSTVLLHLTADVARRKKRRFSVLFIDWEAQYQCTIAHILKMREMYRDVTETFYWVALPLTTVNGVSQFQPEWICWEPGVEWVRQPPDDAITDMSYFPFYRYAMTFEEFVPAFSSWFAGNRCGVAILTGVRADESLNRFMGLVSQRKLRYADDKPWTTASPEGFYYTLYPLYDWKARDIWIYNARTRAIYNPLYDLMYRAGVPLRNMRVCEPFGPEQRKGLWLYHVLEPETWARMCERVSGAASGALYANESGAYFALRKRITKPPHHTWRSYAMFLLDVMPERTAEHYRNKIAVYLRWYQTRGFPDDIPDEQENDLGSRDIPSWRRICKTLIKNDFWCRTLSFSPNKPRHYERYLQRMKERRKEWGIL

SEQ ID NO: 726 - DNA, 537 bp, Escherichia coli
atgttgaattctacaacatcttcgggaaaaagaaccggcattttagcaattggtgcccatcctgatgatatagaattaggatgtggtgcatctctttcatattattctaatgaaaaagtatatattatatctgttgtcatgacacctggttgctgtggcgcagagtatattgatcgtcacaaggaatcacaagaagcattaaatatgttaggatgcaataaactaatccctctaaattttgaagataccagattatatttgcaaataaaagagatgatatcatctctggaatacataattgagaatgaaacgccccaggatgtggaaattactcgagtttacaccatgaataatactgacaggcatcaggatcacattgctgtttatcaggcatcaatggttgcctgtcgttatattcctcaaatactaggatacgaaacaccaagtacatgtctgtcatttttacctcaagtttttgaatctgtagatgaggtccattttaataaaaaaatattagcattacaaaagcataaaagc

SEQ ID NO: 727 - protein, 236 aa, Escherichia coli
MIVIIYDGDSYGISKRIDYMLNSTTSSGKRTGILAIGAHPDDIELGCGASLSYYSNEKVYIISVVMTPGCCGAEYIDRHKESQEALNMLGCNKLIPLNFEDTRLYLQIKEMISSLEYIIENETPQDVEITRVYTMNNTDRHQDHIAVYQASMVACRYIPQILGYETPSTCLSFLPQVFESVDEVHFNKKILALQKHKSQIHRRYIQPEYIIAQAKFRGQQVSHSMCEGFVVHKMVL

SEQ ID NO: 728 - DNA, 4174 bp, Escherichia coli
atcaaacggtatcaccacgtaagcgactggtttacctacacattcctttttgtgcgacacactgcacgttttgtggtttttatcagaaccgttttaatgacgatgcgtgtgctcattataccgacgccctgattcgtgaaatagaaatggaagcagacagcgtattgcatcagtctgcccccatccacgcggtctatttcggtggcggtacgccttccgcgctttcagcacacgatttggccagaatcatcaccacattacgagaaaagctgccactggcccctgattgtgaaatcactattgaaggccgggtactgaattttgacgctgagcgaatcgatgcttgccttgatgctggagcaaaccgcttctcaattggtattcagtcgtttaacagcaaaatccgcaagaaaatggcccgcacctcggatggcccaaccgctattgcgtttatggaaagcctggtcaaacgcgaccgtgccgcggtggtctgtgacctgctgtttggtctgccgggtcaggatgcgcaaacctggggagaagatctggctattgcccgcgatatcggtctcgacggcgtcgatctctatgcgctcaatgtcctgcccaatacaccgctgggcaaagccgtggaaaatgggcgtactaccgtgccctctccggcagaacgtcgcgatctttacctgcaaggatgtgattttatggacgatgccggttggcgctgcatcagtaacagccactggggccgtaccacacgcgaacgcaatctctataacctgctgattaaacaaggtgccgattgtctggcctttggttccggagccggcggttcgattaatgggtactcctggatgaacgaacgcaatcttcagacctggcatgaatccgtcgcggcaggcaaaaaaccgctgatgatgatcatgcgtaacgccgaacgtaatgcgcaatggcgtcataccttgcagtcgggcattgaaacggcgtgtgtaccgctggacgaacttacgccacatgccgaaaaactcgcgccgttactggcccagtggcaccaaaaaggcttaagccgcgatgcgtcaacgtgtctgcggttgaccaatgaaggtcgtttctgggcaagcaacattttgcagtctcttaatgaactgattcaggtacttaatgcgccagcaattgcgcttgaaaaaccataacaggagtgatttatgagccatgtctcgttacaggaatttttgaaaacggagccagacggtacgctggaggcgatcgccgaacaatacaacaccacgctgctggaggtagtgaaaaatctgccctctccgactgttgtgtcaggtgataaattcgatactgtctgggataccgtctgcgaatggggcaacgtcaccacgttagtacatactaccgatgtaatactcgaatttagcggcgaactgccttcgggtttccatcgccacggctatttcaacctacgcggaaagcacggcatgtccgggcatatcaaagcagaaaactgcacgcatattgccttgatcgaacgtaaatttatgggcatggacaccgcctctattctctttttcaataaggaaggcagcgcaatgctgaaaatcttcctcggtagggatgatcatcgtcagctcctgagcgaacaagtcagcgccttccatgctctggcagcatcgttaaaggaacacgcctgatgacaccgtggctactctttggcgcaggcggaaaaggtgtgggtgccagaacgcttgaactggcgctggcggaacaacgtccggtcgttgctgtcattcgtcatgccgatgccgccacgaaactggcgcaacaaggcgtacaggtttttacaggcgacgcctgtgatgccagcgtagtcgcggctgcttgccgcgcagctggcccggatgcgcttatcatctcaacaatgggcggagctcaggattatctggcgcacagaacagtgattgacgaggccgagaaagcaggcatcacacgcatgattctggtgacgtcactgggatgcggcgatagctggccgtttttatcagagcgggcaaaggctgcgtttggtcaggcggtacgggaaaaaacgctggcggaaagctggttgcaaaccagccagcttgattatgccattctccgccctggcggtctgcttgatggtgcggcaacgggcaaagcacaacggatacaaaatcaggagtgtcatggttttattaaccgtgctgatgtcgccgcacatatccatgaactggcaaatgcgccagcacttaaccagcaggtctacagtctgattgaaccggacctgaaaccggcgtgatcccccggcgcggcatgtccgcgccgtaatgtcgtaacggagttttgcgtgctcaaggattcactctcttccgccagggtctttatggggctatcactattattgctagctctggtgctgtttggtgccagtcagggagcgttaaagatcagttttgatgccctttttgatgaggaataccgcgatatctggctcaatattcgtctaccacgggttttgctggcggtgctggtaggtgcagcgttggcaaccgccggggtaattatgcaggggctttttcgcaacccaatggctgaccctggattactcggcgtcagtagcggttctgcattaatggttggcgttgctattgtgctgcccttctccttcccagtggtgctggtgctctatgagcaaatggtgtttgccattgccggaagtttagtggtctgcaccatcatttttctcatcacgcagcgccatcgcgatggcagcatgatgcaattattactcgccggtatcgccatcaatgccctgtgcggcgcagcgatcggcatcctgagctatatcggcgatgagcagcagctacgacaactcacattgtggatgatgggcaatcttggacaggcgcaatggccgacgttattggttgccagttcattcatcctaccggccattatcgcaacaacttgtctcgccggaacgctgaatttactgcagctcggtgatgaagaagcccactacctcggcgtgaacgtgaagcgtaaacgccagcaattactgttagtgagctcactgctcgttggtgctgccgtatcggtaagcggcattatcggctttattggcctggtgatcccgcatctgattcgcatgactaccggggcaaatcaccgctggctaatcccttgttccgccctcgccggagcctgtttattgctgatggcagacacgcttgcccgcacgctggtacagccagcagaaatgcccgtgggattattaaccagcctgcttggtggcccttattttatgtggttgattctgcgcaaccggaggatcacatgatcagcgcccagaatctggtttatagccttcaggggcggcgtctgactgataatgtctcgctgacttttcccggtggggaaattgttgccatcctcgggcctaatggtgcgggaaaatctacgctgcttcgccagctaaccggctatcttcaacctgatagcggcgaatgtcggttgtttaataagccattaaatgaatggtcgattactgaactggcgaaacaccgggccgtgatgcgtcaaaatagccacatggcgtttccattcagcgtacaagaagttatccagatggggcggcatccgcatcgtactggtaatcaggataatgaaacagcacaaataatggcgttatgtgactgtcaggcgttagcaaaccgcgactatcggcaattatccggtggtgaacaacagcgcgtgcaattagcgcgcctgctggtgcaactctgggaacctactccctcaccgaaatggttatttcttgatgaaccaacttcggcgctggatattcaccatcagcagcacttgtttcgtttattacgccagttagttcacgaacggcagttcaatgtttgctgcgtattgcacgatctaaatcttgccgcgcgttatgcagaccgtgttgtattaatgcaaaaaggaaaggttatcgcaaatggtaagccgcaggacgtattgacacagcaggcgctaacaatgctctacggcgcggatattaccgtacttaaagatcctgccaaccattcaccactgatcgtcctcgatcattaaaaccaacaggagtaccgcactggtactcctgcgaataaataactat

SEQ ID NO: 729 - DNA, 1026 bp, Escherichia coli
atgaaccactacacacgctggcttgagttaaaagaacaaaatcccggaaagtacgcgcgtgacatcgcaggtttaatgaatatcagcgaagcagaactggcatttgcacgcgtcacgcacgacgcgtggcggatgcgcggcgatattcgtgaaattctggcggcgctcgaaagtgttggcgagaccaaatgtatttgccgtaatgaatacgcagtccatgaacaagttggtgcgttcacaaaccagcatttgaacggacatgccggattgatcctcaatccgcgcgcgctggatttacgtctgtttctcaatcaatgggccagtgttttccacatcaaagaaaacacggctcgtggcgaacgccagagtattcagttctttgatcatcagggcgatgcattactaaaagtttatgccaccgacaataccgatatggcggcatggagtgagcttctggcacggtttatcaccgatgagaatacgccgcttgagttaaaagccgttgatgcgccagttgttcaaacgcgagccgatgccagtgtggtcgagcaagagtggcgggcgatgaccgacgttcatcagttttttacgttgctcaagcgccacaacctgacgcgccaacaggcgttcaatctggtggcagacgatttggcctgcaaagtatccaacagtgcgttggcgcaaattcttgaatctgcacagcaggatggcaatgaaatcatggtgtttgttggcaaccgtggctgcgtacagattttcaccggtgtggtagaaaaagtggtgccaatgaaaggttggctgaatattttcaacccgacgtttacccttcatctattagaagagagcattgctgaagcctgggttacccgtaaaccgaccagcgatggccacgtaaccagcctggaattgtttgcccatgatggtacgcagatagcgcaactttatggtcaacgtacagaaggtgaacaggagcaagcgcaatggcgtaagcaaattgcttcgttgataccggaaggcgttactgca

SEQ ID NO: 730 - protein, 342 aa, Escherichia coli
MNHYTRWLELKEQNPGKYARDIAGLMNISEAELAFARVTHDAWRMRGDIREILAALESVGETKCICRNEYAVHEQVGAFTNQHLNGHAGLILNPRALDLRLFLNQWASVFHIKENTARGERQSIQFFDHQGDALLKVYATDNTDMAAWSELLARFITDENTPLELKAVDAPVVQTRADASVVEQEWRAMTDVHQFFTLLKRHNLTRQQAFNLVADDLACKVSNSALAQILESAQQDGNEIMVFVGNRGCVQIFTGVVEKVVPMKGWLNIFNPTFTLHLLEESIAEAWVTRKPTSDGHVTSLELFAHDGTQIAQLYGQRTEGEQEQAQWRKQIASLIPEGVTA

SEQ ID NO: 731 - DNA, 1980 bp, Escherichia coli
atgtcacgtccgcaatttacctcgttgcgtttgagtttgttggctttggctgtttctgccaccttgccaacgtttgcttttgctactgaaaccatgaccgttacggcaacggggaatgcacgtagttccttcgaagcgcctatgatggtcagcgttatcgacacttccgctcctgaaaatcaaactgctacttcagccactgatttgctgcgtcatgttcctggaattactcttgatggtaccggacgaaccaacggtcaggatgtaaatatgcgtggctatgatcatcgcggcgtgctggttcttgtcgatggtgttcgccagggaacggataccggacacctgaatggcacttttctcgatccggcgctgatcaagcgtgttgagattgttcgcggaccttcagcattactgtatggcagtggcgcgctgggtggagtgatctcctacgatacggtcgatgcaaaagatttattgcaggaaggacaaagcagtggttttcgtgtctttggtactggcggcacgggggaccatagcctgggattaggcgcgagcgcgtttgggcgaactgaaaatctggatggtattgtggcctggtccagtcgcgatcggggtgatttacgccagagcaatggtgaaaccgcgccgaatgacgagtccattaataacatgctggcgaaagggacctggcaaattgattcagcccagtctctgagcggtttagtgcgttactacaacaacgacgcgcgtgaaccaaaaaatccgcagaccgttgaagcttctgatagcagcaacccgatggtcgatcgttcaacaattcaacgcgatgcgcagctttcttataaactcgccccgcagggtaacgactggttaaatgcagatgcaaaaatttactggtcggaagtccgtattaatgcgcaaaacacggggagttcaggcgagtatcgtgaacagataacaaaaggagcaaggctggagaaccgttccactctatttgccgacagtttcgcttctcacttactgacatatggcggtgagtattatcgtcaggaacaacatccgggtggcgcgacgacgggcttcccgcaagcaaaaatcgattttagctctggttggctacaagatgagatcaccttacgcgatctgccgattaccctgcttggcggaacccgctatgacagttatcgcggtagcagcgacggctacaaagatgttgatgccgacaaatggtcatctcgtgcggggatgactatcaacccgaccaactggctgatgttatttggctcatatgctcaggcattccgcgccccgacgatgggcgaaatgtataacgattctaaacacttctcgattggtcgcttctataccaactattgggtgccaaacccgaacttacgtccggaaactaacgaaactcaggagtacggttttgggctgcgttttgatgacctgatgttgtccaatgatgctctggaatttaaagccagctactttgataccaaagcgaaagattatatctccacgaccgtcgatttcgcggcggcgacaactatgtcgtataacgtcccgaacgccaaaatctggggctgggatgtgatgacgaaatataccactgatctgtttagccttgatgtggcctataaccgtacccgcggcaaagacaccgataccggggaatatatctccagcattaacccggataccgttaccagtaccctgaatattccgatcgctcacagcggcttctctgttggttgggtcggtacgtttgccgatcgctcaacacatatcagcagcagctacagcaaacaacctggctatggtgtgaatgatttctacgtcagttatcaagggcagcaggcgctcaaaggcatgaccactactctggtattgggcaacgccttcgataaagagtactggtcgccgcaaggcatcccacaggatggtcgtaacggaaaaattttcgtgagttatcaatgg

SEQ ID NO: 732 - protein, 660 aa, Escherichia coli
MSRPQFTSLRLSLLALAVSATLPTFAFATETMTVTATGNARSSFEAPMMVSVIDTSAPENQTATSATDLLRHVPGITLDGTGRTNGQDVNMRGYDHRGVLVLVDGVRQGTDTGHLNGTFLDPALIKRVEIVRGPSALLYGSGALGGVISYDTVDAKDLLQEGQSSGFRVFGTGGTGDHSLGLGASAFGRTENLDGIVAWSSRDRGDLRQSNGETAPNDESINNMLAKGTWQIDSAQSLSGLVRYYNNDAREPKNPQTVEASDSSNPMVDRSTIQRDAQLSYKLAPQGNDWLNADAKIYWSEVRINAQNTGSSGEYREQITKGARLENRSTLFADSFASHLLTYGGEYYRQEQHPGGATTGFPQAKIDFSSGWLQDEITLRDLPITLLGGTRYDSYRGSSDGYKDVDADKWSSRAGMTINPTNWLMLFGSYAQAFRAPTMGEMYNDSKHFSIGRFYTNYWVPNPNLRPETNETQEYGFGLRFDDLMLSNDALEFKASYFDTKAKDYISTTVDFAAATTMSYNVPNAKIWGWDVMTKYTTDLFSLDVAYNRTRGKDTDTGEYISSINPDTVTSTLNIPIAHSGFSVGWVGTFADRSTHISSSYSKQPGYGVNDFYVSYQGQQALKGMTTTLVLGNAFDKEYWSPQGIPQDGRNGKIFVSYQW

SEQ ID NO: 733 - DNA, 912 bp, Escherichia coli
atgccaaggatcatcaccaggccgtttcttttttccccactaacgttatgtatttcagccgtggtctctgccgcgaagaccatggtaaaacgaaaaaaattgtttacggcattactggctcttagctggacttttagcgtaacggctgccgaacgtatcgtggtcgcaggaggatcgctgacggagttaatctacgcgatgggcgctggcaaacgcgtggttggtgtcgatgaaacgacatcttatccaccagaaaccgccaaactgccgcatattggttactggaaacaactcagcagcgaaggcattttgtcacttcgcccggatagcgtaattacctggcaggatgcaggaccgcaaattgtgctcgaccaactgcgggcgcaaaaagtcaacgtcgtcactctgccgcgtgtaccagccacccttgagcagatgtacgccaacattcgccaactggcaaaaacgttacaggttcctgaacaaggcgaggcgctggtgacacagatcaaccaacgcctggagcgagtacagcaaaacgtggcggccaaaaaagccccggttaaagccatgtttattctctccgcaggcggaagtgcgccacaggttgccggtaaaggcagcgtcgcggacgccattctttcgcttgccggagcagaaaacgtcgctacccaccagcagtacaaaagctacagcgcggaatcgctgattgcggctaaccctgaagtgattgtcgtcacctcacaaatggtcgatggcgatattaatcggctacgttctattgccggaattacccacactgccgcatggaaaaaccagcgcattatcaccgttgatcaaaacctgattctgggaatgggtccgcgtattgctgatgtcgttgagtctttacaccagcagctttggccgcaa

SEQ ID NO: 734 - protein, 304 aa, Escherichia coli
MPRIITRPFLFSPLTLCISAVVSAAKTMVKRKKLFTALLALSWTFSVTAAERIVVAGGSLTELIYAMGAGKRVVGVDETTSYPPETAKLPHIGYWKQLSSEGILSLRPDSVITWQDAGPQIVLDQLRAQKVNVVTLPRVPATLEQMYANIRQLAKTLQVPEQGEALVTQINQRLERVQQNVAAKKAPVKAMFILSAGGSAPQVAGKGSVADAILSLAGAENVATHQQYKSYSAESLIAANPEVIVVTSQMVDGDINRLRSIAGITHTAAWKNQRIITVDQNLILGMGPRIADVVESLHQQLWPQ

SEQ ID NO: 735 - DNA, 1335 bp, Escherichia coli
atgaacacaaataacaccctggatctcacgccacattttgctttagacggtgatcagccctttaaagacaggcgcgccatgatgccgtttcgtggggccattccggttgccaaagagcaactggcacagacctggcaagagatgatcaatcaaacggtatcaccacgtaagcgactggtttacctacacattcctttttgtgcgacacactgcacgttttgtggtttttatcagaaccgttttaatgacgatgcgtgtgctcattataccgacgccctgattcgtgaaatagaaatggaagcagacagcgtattgcatcagtctgcccccatccacgcggtctatttcggtggcggtacgccttccgcgctttcagcacacgatttggccagaatcatcaccacattacgagaaaagctgccactggcccctgattgtgaaatcactattgaaggccgggtactgaattttgacgctgagcgaatcgatgcttgccttgatgctggagcaaaccgcttctcaattggtattcagtcgtttaacagcaaaatccgcaagaaaatggcccgcacctcggatggcccaaccgctattgcgtttatggaaagcctggtcaaacgcgaccgtgccgcggtggtctgtgacctgctgtttggtctgccgggtcaggatgcgcaaacctggggagaagatctggctattgcccgcgatatcggtctcgacggcgtcgatctctatgcgctcaatgtcctgcccaatacaccgctgggcaaagccgtggaaaatgggcgtactaccgtgccctctccggcagaacgtcgcgatctttacctgcaaggatgtgattttatggacgatgccggttggcgctgcatcagtaacagccactggggccgtaccacacgcgaacgcaatctctataacctgctgattaaacaaggtgccgattgtctggcctttggttccggagccggcggttcgattaatgggtactcctggatgaacgaacgcaatcttcagacctggcatgaatccgtcgcggcaggcaaaaaaccgctgatgatgatcatgcgtaacgccgaacgtaatgcgcaatggcgtcataccttgcagtcgggcattgaaacggcgtgtgtaccgctggacgaacttacgccacatgccgaaaaactcgcgccgttactggcccagtggcaccaaaaaggcttaagccgcgatgcgtcaacgtgtctgcggttgaccaatgaaggtcgtttctgggcaagcaacattttgcagtctcttaatgaactgattcaggtacttaatgcgccagcaattgcgcttgaaaaacca

SEQ ID NO: 736 - protein, 445 aa, Escherichia coli
MNTNNTLDLTPHFALDGDQPFKDRRAMMPFRGAIPVAKEQLAQTWQEMINQTVSPRKRLVYLHIPFCATHCTFCGFYQNRFNDDACAHYTDALIREIEMEADSVLHQSAPIHAVYFGGGTPSALSAHDLARIITTLREKLPLAPDCEITIEGRVLNFDAERIDACLDAGANRFSIGIQSFNSKIRKKMARTSDGPTAIAFMESLVKRDRAAVVCDLLFGLPGQDAQTWGEDLAIARDIGLDGVDLYALNVLPNTPLGKAVENGRTTVPSPAERRDLYLQGCDFMDDAGWRCISNSHWGRTTRERNLYNLLIKQGADCLAFGSGAGGSINGYSWMNERNLQTWHESVAAGKKPLMMIMRNAERNAQWRHTLQSGIETACVPLDELTPHAEKLAPLLAQWHQKGLSRDASTCLRLTNEGRFWASNILQSLNELIQVLNAPAIALEKP

SEQ ID NO: 737 - DNA, 492 bp, Escherichia coli
atgagccatgtctcgttacaggaatttttgaaaacggagccagacggtacgctggaggcgatcgccgaacaatacaacaccacgctgctggaggtagtgaaaaatctgccctctccgactgttgtgtcaggtgataaattcgatactgtctgggataccgtctgcgaatggggcaacgtcaccacgttagtacatactaccgatgtaatactcgaatttagcggcgaactgccttcgggtttccatcgccacggctatttcaacctacgcggaaagcacggcatgtccgggcatatcaaagcagaaaactgcacgcatattgccttgatcgaacgtaaatttatgggcatggacaccgcctctattctctttttcaataaggaaggcagcgcaatgctgaaaatcttcctcggtagggatgatcatcgtcagctcctgagcgaacaagtcagcgccttccatgctctggcagcatcgttaaaggaacacgcc

SEQ ID NO: 738 - protein, 164 aa, Escherichia coli
MSHVSLQEFLKTEPDGTLEAIAEQYNTTLLEVVKNLPSPTVVSGDKFDTVWDTVCEWGNVTTLVHTTDVILEFSGELPSGFHRHGYFNLRGKHGMSGHIKAENCTHIALIERKFMGMDTASILFFNKEGSAMLKIFLGRDDHRQLLSEQVSAFHALAASLKEHA

SEQ ID NO: 739 - DNA, 621 bp, Escherichia coli
atgacaccgtggctactctttggcgcaggcggaaaaggtgtgggtgccagaacgcttgaactggcgctggcggaacaacgtccggtcgttgctgtcattcgtcatgccgatgccgccacgaaactggcgcaacaaggcgtacaggtttttacaggcgacgcctgtgatgccagcgtagtcgcggctgcttgccgcgcagctggcccggatgcgcttatcatctcaacaatgggcggagctcaggattatctggcgcacagaacagtgattgacgaggccgagaaagcaggcatcacacgcatgattctggtgacgtcactgggatgcggcgatagctggccgtttttatcagagcgggcaaaggctgcgtttggtcaggcggtacgggaaaaaacgctggcggaaagctggttgcaaaccagccagcttgattatgccattctccgccctggcggtctgcttgatggtgcggcaacgggcaaagcacaacggatacaaaatcaggagtgtcatggttttattaaccgtgctgatgtcgccgcacatatccatgaactggcaaatgcgccagcacttaaccagcaggtctacagtctgattgaaccggacctgaaaccggcg

SEQ ID NO: 740 - protein, 207 aa, Escherichia coli
MTPWLLFGAGGKGVGARTLELALAEQRPVVAVIRHADAATKLAQQGVQVFTGDACDASVVAAACRAAGPDALIISTMGGAQDYLAHRTVIDEAEKAGITRMILVTSLGCGDSWPFLSERAKAAFGQAVREKTLAESWLQTSQLDYAILRPGGLLDGAATGKAQRIQNQECHGFINRADVAAHIHELANAPALNQQVYSLIEPDLKPA

SEQ ID NO: 741 - DNA, 954 bp, Escherichia coli
atggggctatcactattattgctagctctggtgctgtttggtgccagtcagggagcgttaaagatcagttttgatgccctttttgatgaggaataccgcgatatctggctcaatattcgtctaccacgggttttgctggcggtgctggtaggtgcagcgttggcaaccgccggggtaattatgcaggggctttttcgcaacccaatggctgaccctggattactcggcgtcagtagcggttctgcattaatggttggcgttgctattgtgctgcccttctccttcccagtggtgctggtgctctatgagcaaatggtgtttgccattgccggaagtttagtggtctgcaccatcatttttctcatcacgcagcgccatcgcgatggcagcatgatgcaattattactcgccggtatcgccatcaatgccctgtgcggcgcagcgatcggcatcctgagctatatcggcgatgagcagcagctacgacaactcacattgtggatgatgggcaatcttggacaggcgcaatggccgacgttattggttgccagttcattcatcctaccggccattatcgcaacaacttgtctcgccggaacgctgaatttactgcagctcggtgatgaagaagcccactacctcggcgtgaacgtgaagcgtaaacgccagcaattactgttagtgagctcactgctcgttggtgctgccgtatcggtaagcggcattatcggctttattggcctggtgatcccgcatctgattcgcatgactaccggggcaaatcaccgctggctaatcccttgttccgccctcgccggagcctgtttattgctgatggcagacacgcttgcccgcacgctggtacagccagcagaaatgcccgtgggattattaaccagcctgcttggtggcccttattttatgtggttgattctgcgcaaccggaggatcaca

SEQ ID NO: 742 - protein, 318 aa, Escherichia coli
MGLSLLLLALVLFGASQGALKISFDALFDEEYRDIWLNIRLPRVLLAVLVGAALATAGVIMQGLFRNPMADPGLLGVSSGSALMVGVAIVLPFSFPVVLVLYEQMVFAIAGSLVVCTIIFLITQRHRDGSMMQLLLAGIAINALCGAAIGILSYIGDEQQLRQLTLWMMGNLGQAQWPTLLVASSFILPAIIATTCLAGTLNLLQLGDEEAHYLGVNVKRKRQQLLLVSSLLVGAAVSVSGIIGFIGLVIPHLIRMTTGANHRWLIPCSALAGACLLLMADTLARTLVQPAEMPVGLLTSLLGGPYFMWLILRNRRIT

SEQ ID NO: 743 - DNA, 768 bp, Escherichia coli
atgatcagcgcccagaatctggtttatagccttcaggggcggcgtctgactgataatgtctcgctgacttttcccggtggggaaattgttgccatcctcgggcctaatggtgcgggaaaatctacgctgcttcgccagctaaccggctatcttcaacctgatagcggcgaatgtcggttgtttaataagccattaaatgaatggtcgattactgaactggcgaaacaccgggccgtgatgcgtcaaaatagccacatggcgtttccattcagcgtacaagaagttatccagatggggcggcatccgcatcgtactggtaatcaggataatgaaacagcacaaataatggcgttatgtgactgtcaggcgttagcaaaccgcgactatcggcaattatccggtggtgaacaacagcgcgtgcaattagcgcgcctgctggtgcaactctgggaacctactccctcaccgaaatggttatttcttgatgaaccaacttcggcgctggatattcaccatcagcagcacttgtttcgtttattacgccagttagttcacgaacggcagttcaatgtttgctgcgtattgcacgatctaaatcttgccgcgcgttatgcagaccgtgttgtattaatgcaaaaaggaaaggttatcgcaaatggtaagccgcaggacgtattgacacagcaggcgctaacaatgctctacggcgcggatattaccgtacttaaagatcctgccaaccattcaccactgatcgtcctcgatcat

SEQ ID NO: 744 - protein, 256 aa, Escherichia coli
MISAQNLVYSLQGRRLTDNVSLTFPGGEIVAILGPNGAGKSTLLRQLTGYLQPDSGECRLFNKPLNEWSITELAKHRAVMRQNSHMAFPFSVQEVIQMGRHPHRTGNQDNETAQIMALCDCQALANRDYRQLSGGEQQRVQLARLLVQLWEPTPSPKWLFLDEPTSALDIHHQQHLFRLLRQLVHERQFNVCCVLHDLNLAARYADRVVLMQKGKVIANGKPQDVLTQQALTMLYGADITVLKDPANHSPLIVLDH

SEQ ID NO: 745 - DNA, 6678 bp, Escherichia coli
ttctcgtcgctgtaatcacagcctctcaccatttactcgctcctgctggcacatgcaggagcctgtttcagagatcgaatctttataacgttcttaacattatatattcaactccacctacacttctgagcgatcgtagcaggctaaattctgaaaatcaggtacacattaaagaatgatgtatcaatatcaacaatgaatttccgcatatcaatgctcgaaacataattaattatttaaatttttcaatcagcttcgcaaattccacaataaaacatcactcaactgaatatttacctttccctgccctgtgcctttatccggtgaaacatttgacatcgattgacaccgatcattaaaatccgcgcgattaatattattggctacaaactgaaatcgtttgacatttaataacatattcgcacaaccaattaatacaaaaactctctaacaaatttattttgcggatatgccccattccaatcattcataaaaaaaatgattgtgccgtaattatcaactgtatcgggattatgaaaaggaattcatcctatgaacctaaagaaaacactgttaagcgtgttaatgatattgcaactttgcttattggtagggtgtgactatattgaaaaagcgagtaaggtcgacgatctcgttacacagcaagagttgcaaaaaagcaaaattgaggcgcttgaaaaacaacaagaactcgacaagcgcaagatagaacactttgaaaaacaacaaactaccatcataaacagtaccaaaacgctcgctggtgtggtgaaggcagttaaaaacaaacaggacgaatttgtctttacagaatttaacccggcacaaacccaatactttattttaaataacggctctgttggtttggcagggaaaatactgtctattgacgcagtagaaaacggcagtgttattcgtatttcactggttaacttattaagtgttcctgtatcaaatatgggtttctacgcaacatgggggggagaaaaacccaccgacatcaacgcattagcaaaatggcagcaattgctatttagtaccgcaatgaactcctccctgaaattattaccaggtcaatggcaagacattaatttgacgctaaaaggtgtctcgcccaacaacctcaaatatctgaaattagccatcaacatggcaaatattcagttcgaccgtcttcaacctgctgaatctccacagcggaaaaacaaaaaataaatgcagcttctgcgcttatatcaaggaatagagagcatcaataatgaacaaaatatttaaagttatctggaatccggcaacaggcagttacaccgttgccagcgaaacggcgaagagccgtggtaaaaaaagcgggcgcagtaagctgttaatttctgcactggttgcgggtgggttgttgtcgtcgtttggggcaagtgcagataattacactgggcagccaactgattatggcgatggctcagcaggtgacggctgggttgctatcggtaaaggggcaaaagcaaatacctttatgaacactagtggcgcgagtacagctttaggatatgacgcgatagccgaaggtgagtacagttctgccatcgggtcaaaaacccttgcaactggtggagcatccatggcgttcggggttagtgcaaaagcaatgggtgacagaagtgtcgcgctaggtgcatcgtcagtagcaaatggcgatcgttcgatggcttttggtcgttacgcaaagacgaatggttttacatctcttgctattggggactcctcccttgccgatggtgaaaaaactattgcgttaggaaatacggctaaagcttacgaaattatgagcatcgccctcggtgataatgccaatgcgtcaaaagagtatgcaatggcgctgggagcaagtagcaaagctggcggtgctgatagcctcgcattcggcagaaaatctacagctaatagcactggctcactggcaataggtgctgacagtagcagttcgaacgataacgccatcgcgatagggaacaaaacgcaagccctgggagtgaattcgatggccctgggtaatgcaagtcaggcatctggcgaatccagtattgcattaggtaacaccagtgaagccagcgaacaaaatgcgattgcgctggggcaaggtagcattgcaagcaaagtgaactcaatcgcgttgggaagtaacagtttgtcctcgggagagaatgccatcgcattgggagagggtagtgccgctggtggcagcaacagccttgctttcggtagccagtccagggcaaacggcaatgattctgtcgccatcggtgtaggggctgcagcagcgaccgacaattctgtcgctatcggcgcaggatcgaccacagatgcaagcaatacggtttcagttggcaacagcgcaacaaaacgcaaaattgttaatatggctgctggtgccataagcaacaccagtaccgatgccatcaacggctcacagctttatacgatcagtgattcagtcgccaagcgactcggaggaggcgctactgtaggcagcgatggcaccgtaaccgcagtaagctacgcgttgagaagcggaacctataataacgtgggtgatgctctgtcaggaatcgacaataataccctacaatggaataaaaccgcgggggcgttcagcgccaatcacggtgcaaatgccaccaacaaaatcactaatgttgctaaaggtacggtttctgcaaccagcaccgatgtagtaaacggctctcaattgtacgacctgcagcaggatgctctgttgtggaacggcacagcattcagtgccgcacacggcaccgaagccaccagcaaaatcactaacgtcaccgctggcaacctgactgccggcagcactgacgccgttaacggctctcagctcaaaaccaccaacgacaacgtgacgaccaacaccaccaacatcgccactaacaccaccaatatcaccaacctgactgacgctgttaacggtctcggtgacgactccctgctgtggaacaaagcagctggcgcattcagcgccgcgcacggcaccgaagccaccagcaaaatcaccaacgtcaccgctggcaacctgactgccggtagcactgacgccgttaacggctcccagctcaaaaccaccaacgacaacgtgacgaccaacaccaccaacatcgccactaacaccaccaatatcaccaacctgactgacgctgttaacggtctcggtgacgactccctgctgtggaacaaaacagctggcgcattcagcgccgcgcacggcactgacgccaccagcaagatcaccaacgtcaccgctggcaacctgactgccggcagcactgacgccgttaacggctcccagctcaaaaccaccaacgacaacgtgacgaccaacaccaccaacatcgccactaacaccaccaatatcaccaacctgactgacgctgttaacggtctcggtgacgactccctgctgtggaacaaaacagctggcgcattcagcgccgcgcacggcactgacgccaccagcaagatcaccaatgtcaaagccggtgacctgacagctggcagcactgacgccgttaacggctctcagctcaaaaccaccaacgataacgtgtcgaccaacaccaccaacatcaccaacctgactgacgctgttaacggtctcggtgacgactccctgctgtggaacaaaacagctggcgcattcagcgccgctcacggcactgacgccaccagcaagatcaccaatgtcaaagccggtgacctgacagctggcagcactgacgccgttaacggctcccagctcaaaaccaccaacgataacgtgtcgaccaacaccaccaacatcactaacctgacggattccgttggcgaccttaaggacgattctctgctgtggaacaaagcggctggcgcattcagcgccgcgcacggtaccgaagctaccagcaagatcaccaacttactggctggcaagatatcttctaacagcactgatgccattaatggctcacaactttatggcgtagcggattcatttacgtcatatcttggtggtggtgctgatatcagcgatacgggtgtattaagtgggccaacctacactattggtggtactgactacactaacgtcggtgatgctctggcagccattaacacatcatttagcacatcactcggcgacgccctactttgggatgcaaccgcaggcaaattcagcgccaaacacggcattaataatgctcccagtgtaatcactgatgttgcaaacggtgcagtctcgtccaccagcagcgacgccattaacggttcacaactttatggtgttagtgactacattgccgatgctctgggcgggaatgctgtggtgaacactgacggcagtatcactacaccaacttatgccatcgctggcggcagttacaacaacgtcggtgacgcgctggaagcgatcgataccacgctggatgatgctctgctgtgggatacaacagccaatggcggtaacggtgcatttagcgccgctcacgggaaagataaaactgccagtgtaatcactaacgtcgctaacggtgcagtctctgccaccagcaacgatgccattaatggctcacagctctatagcactaataagtacatcgctgatgcgctgggtggtgatgcagaagtcaacgctgacggtactatcactgcaccgacttacaccattgcaaataccgattacaacaacgtcggtgaagccctggatgcgctcgataataacgcgctgctgtgggatgaagacgcaggtgcctacaacgccagccatgatggcaatgccagcaaaatcaccaacgttgcggctggtgatctctccacaaccagtaccgatgctgttaacggttcccagttaaacgcaaccaatattctggttacgcaaaatagccaaatgattaaccagcttgctggtaacactagcgaaacctacatcgaggaaaacggtgcgggtattaactatgtacgtaccaacgacagcggcttagcgttcaacgatgccagcgcttcaggtattggcgctacagctgtaggttataacgcagttgcctctcatgccagcagtgtagccatcggtcaggacagcatcagcgaagttgatacgggtatcgctctgggtagcagttccgtttccagccgtgtaatagttaaagggactcgtaacaccagcgtatcggaagaaggtgttgtgattggttatgacaccacggatggcgaactgcttggcgcgttgtcgattggtgatgacggtaaatatcgtcaaatcatcaacgtcgcggatggttctgaagcccatgatgcggtcactgttcgccagttgcaaaacgccattggtgcagtcgcaaccacaccaaccaaatactatcacgccaactcaacggctgaagactcactggcagtcggtgaagactcgctggcaatgggcgcgaaaaccatcgttaatggtaatgcgggtattggtatcggcctgaacacgctggttctggctgatgcgatcaacggtattgctatcggttctaacgcacgcgcaaatcatgccgacagcattgcaatgggtaatggttctcagactacccgtggtgcgcagaccaactacactgcctacaacatggatgcaccgcagaactctgtgggtgagttctctgtcggcagtgaagacggtcaacgtcagatcaccaacgtcgcagcaggttcggcggataccgatgcggttaacgtgggtcagttgaaagtaacggacgcgcaggtttcccagaatacccagagcattactaacctgaacactcaggtcactaatctggatactcgcgtgaccaatatcgaaaacggcattggcgatatcgtaaccaccggtagcactaagtacttcaagaccaacaccgatggcgcagatgccaacgcgcagggtaaagacagtgttgcgattggttctggttccattgctgccgctgacaacagcgtcgcactgggcacgggttccgtagcagacgaagaaaacaccatctctgtgggttcttctaccaaccagcgtcgtatcaccaacgttgctgccggtgttaatgccaccgatgcggttaacgtttcgcaactgaagtcttctgaagcaggcggcgttcgctacgacaccaaagctgatggctctatcgactacagcaacatcactctcggtggcggcaatagcggtacgactcgcatcagcaacgtttctgctggcgtgaacaacaacgacgcagtgaactatgcgcagttgaagcaaagtgtgcaggaaacgaagcaatacaccgatcagcgcatggttgagatggataacaaactgtccaaaactgaaagcaagctgagtggtggtatcgcttctgcaatggcaatgaccggtctgccgcaggcttacacgccgggtgccagcatggcctctattggtggcggtacttacaacggtgaatcggctgttgctttaggtgtgtcgatggtgagcgccaatggtcgttgggtctacaaattacaaggtagtaccaatagccagggtgaatactccgccgcactcggtgccggtattcagtggtaatcatccattaacaaatgggtaaacgccacattgcctgatgcgctacgcttatcaggcctacg

SEQ ID NO: 746 - DNA, 681 bp, Escherichia coli
atgaacctaaagaaaacactgttaagcgtgttaatgatattgcaactttgcttattggtagggtgtgactatattgaaaaagcgagtaaggtcgacgatctcgttacacagcaagagttgcaaaaaagcaaaattgaggcgcttgaaaaacaacaagaactcgacaagcgcaagatagaacactttgaaaaacaacaaactaccatcataaacagtaccaaaacgctcgctggtgtggtgaaggcagttaaaaacaaacaggacgaatttgtctttacagaatttaacccggcacaaacccaatactttattttaaataacggctctgttggtttggcagggaaaatactgtctattgacgcagtagaaaacggcagtgttattcgtatttcactggttaacttattaagtgttcctgtatcaaatatgggtttctacgcaacatgggggggagaaaaacccaccgacatcaacgcattagcaaaatggcagcaattgctatttagtaccgcaatgaactcctccctgaaattattaccaggtcaatggcaagacattaatttgacgctaaaaggtgtctcgcccaacaacctcaaatatctgaaattagccatcaacatggcaaatattcagttcgaccgtcttcaacctgctgaatctccacagcggaaaaacaaaaaa

SEQ ID NO: 747 - protein, 227 aa, Escherichia coli
MNLKKTLLSVLMILQLCLLVGCDYIEKASKVDDLVTQQELQKSKIEALEKQQELDKRKIEHFEKQQTTIINSTKTLAGVVKAVKNKQDEFVFTEFNPAQTQYFILNNGSVGLAGKILSIDAVENGSVIRISLVNLLSVPVSNMGFYATWGGEKPTDINALAKWQQLLFSTAMNSSLKLLPGQWQDINLTLKGVSPNNLKYLKLAINMANIQFDRLQPAESPQRKNKK

SEQ ID NO: 748 - DNA, 5334 bp, Escherichia coli
atgaacaaaatatttaaagttatctggaatccggcaacaggcagttacaccgttgccagcgaaacggcgaagagccgtggtaaaaaaagcgggcgcagtaagctgttaatttctgcactggttgcgggtgggttgttgtcgtcgtttggggcaagtgcagataattacactgggcagccaactgattatggcgatggctcagcaggtgacggctgggttgctatcggtaaaggggcaaaagcaaatacctttatgaacactagtggcgcgagtacagctttaggatatgacgcgatagccgaaggtgagtacagttctgccatcgggtcaaaaacccttgcaactggtggagcatccatggcgttcggggttagtgcaaaagcaatgggtgacagaagtgtcgcgctaggtgcatcgtcagtagcaaatggcgatcgttcgatggcttttggtcgttacgcaaagacgaatggttttacatctcttgctattggggactcctcccttgccgatggtgaaaaaactattgcgttaggaaatacggctaaagcttacgaaattatgagcatcgccctcggtgataatgccaatgcgtcaaaagagtatgcaatggcgctgggagcaagtagcaaagctggcggtgctgatagcctcgcattcggcagaaaatctacagctaatagcactggctcactggcaataggtgctgacagtagcagttcgaacgataacgccatcgcgatagggaacaaaacgcaagccctgggagtgaattcgatggccctgggtaatgcaagtcaggcatctggcgaatccagtattgcattaggtaacaccagtgaagccagcgaacaaaatgcgattgcgctggggcaaggtagcattgcaagcaaagtgaactcaatcgcgttgggaagtaacagtttgtcctcgggagagaatgccatcgcattgggagagggtagtgccgctggtggcagcaacagccttgctttcggtagccagtccagggcaaacggcaatgattctgtcgccatcggtgtaggggctgcagcagcgaccgacaattctgtcgctatcggcgcaggatcgaccacagatgcaagcaatacggtttcagttggcaacagcgcaacaaaacgcaaaattgttaatatggctgctggtgccataagcaacaccagtaccgatgccatcaacggctcacagctttatacgatcagtgattcagtcgccaagcgactcggaggaggcgctactgtaggcagcgatggcaccgtaaccgcagtaagctacgcgttgagaagcggaacctataataacgtgggtgatgctctgtcaggaatcgacaataataccctacaatggaataaaaccgcgggggcgttcagcgccaatcacggtgcaaatgccaccaacaaaatcactaatgttgctaaaggtacggtttctgcaaccagcaccgatgtagtaaacggctctcaattgtacgacctgcagcaggatgctctgttgtggaacggcacagcattcagtgccgcacacggcaccgaagccaccagcaaaatcactaacgtcaccgctggcaacctgactgccggcagcactgacgccgttaacggctctcagctcaaaaccaccaacgacaacgtgacgaccaacaccaccaacatcgccactaacaccaccaatatcaccaacctgactgacgctgttaacggtctcggtgacgactccctgctgtggaacaaagcagctggcgcattcagcgccgcgcacggcaccgaagccaccagcaaaatcaccaacgtcaccgctggcaacctgactgccggtagcactgacgccgttaacggctcccagctcaaaaccaccaacgacaacgtgacgaccaacaccaccaacatcgccactaacaccaccaatatcaccaacctgactgacgctgttaacggtctcggtgacgactccctgctgtggaacaaaacagctggcgcattcagcgccgcgcacggcactgacgccaccagcaagatcaccaacgtcaccgctggcaacctgactgccggcagcactgacgccgttaacggctcccagctcaaaaccaccaacgacaacgtgacgaccaacaccaccaacatcgccactaacaccaccaatatcaccaacctgactgacgctgttaacggtctcggtgacgactccctgctgtggaacaaaacagctggcgcattcagcgccgcgcacggcactgacgccaccagcaagatcaccaatgtcaaagccggtgacctgacagctggcagcactgacgccgttaacggctctcagctcaaaaccaccaacgataacgtgtcgaccaacaccaccaacatcaccaacctgactgacgctgttaacggtctcggtgacgactccctgctgtggaacaaaacagctggcgcattcagcgccgctcacggcactgacgccaccagcaagatcaccaatgtcaaagccggtgacctgacagctggcagcactgacgccgttaacggctcccagctcaaaaccaccaacgataacgtgtcgaccaacaccaccaacatcactaacctgacggattccgttggcgaccttaaggacgattctctgctgtggaacaaagcggctggcgcattcagcgccgcgcacggtaccgaagctaccagcaagatcaccaacttactggctggcaagatatcttctaacagcactgatgccattaatggctcacaactttatggcgtagcggattcatttacgtcatatcttggtggtggtgctgatatcagcgatacgggtgtattaagtgggccaacctacactattggtggtactgactacactaacgtcggtgatgctctggcagccattaacacatcatttagcacatcactcggcgacgccctactttgggatgcaaccgcaggcaaattcagcgccaaacacggcattaataatgctcccagtgtaatcactgatgttgcaaacggtgcagtctcgtccaccagcagcgacgccattaacggttcacaactttatggtgttagtgactacattgccgatgctctgggcgggaatgctgtggtgaacactgacggcagtatcactacaccaacttatgccatcgctggcggcagttacaacaacgtcggtgacgcgctggaagcgatcgataccacgctggatgatgctctgctgtgggatacaacagccaatggcggtaacggtgcatttagcgccgctcacgggaaagataaaactgccagtgtaatcactaacgtcgctaacggtgcagtctctgccaccagcaacgatgccattaatggctcacagctctatagcactaataagtacatcgctgatgcgctgggtggtgatgcagaagtcaacgctgacggtactatcactgcaccgacttacaccattgcaaataccgattacaacaacgtcggtgaagccctggatgcgctcgataataacgcgctgctgtgggatgaagacgcaggtgcctacaacgccagccatgatggcaatgccagcaaaatcaccaacgttgcggctggtgatctctccacaaccagtaccgatgctgttaacggttcccagttaaacgcaaccaatattctggttacgcaaaatagccaaatgattaaccagcttgctggtaacactagcgaaacctacatcgaggaaaacggtgcgggtattaactatgtacgtaccaacgacagcggcttagcgttcaacgatgccagcgcttcaggtattggcgctacagctgtaggttataacgcagttgcctctcatgccagcagtgtagccatcggtcaggacagcatcagcgaagttgatacgggtatcgctctgggtagcagttccgtttccagccgtgtaatagttaaagggactcgtaacaccagcgtatcggaagaaggtgttgtgattggttatgacaccacggatggcgaactgcttggcgcgttgtcgattggtgatgacggtaaatatcgtcaaatcatcaacgtcgcggatggttctgaagcccatgatgcggtcactgttcgccagttgcaaaacgccattggtgcagtcgcaaccacaccaaccaaatactatcacgccaactcaacggctgaagactcactggcagtcggtgaagactcgctggcaatgggcgcgaaaaccatcgttaatggtaatgcgggtattggtatcggcctgaacacgctggttctggctgatgcgatcaacggtattgctatcggttctaacgcacgcgcaaatcatgccgacagcattgcaatgggtaatggttctcagactacccgtggtgcgcagaccaactacactgcctacaacatggatgcaccgcagaactctgtgggtgagttctctgtcggcagtgaagacggtcaacgtcagatcaccaacgtcgcagcaggttcggcggataccgatgcggttaacgtgggtcagttgaaagtaacggacgcgcaggtttcccagaatacccagagcattactaacctgaacactcaggtcactaatctggatactcgcgtgaccaatatcgaaaacggcattggcgatatcgtaaccaccggtagcactaagtacttcaagaccaacaccgatggcgcagatgccaacgcgcagggtaaagacagtgttgcgattggttctggttccattgctgccgctgacaacagcgtcgcactgggcacgggttccgtagcagacgaagaaaacaccatctctgtgggttcttctaccaaccagcgtcgtatcaccaacgttgctgccggtgttaatgccaccgatgcggttaacgtttcgcaactgaagtcttctgaagcaggcggcgttcgctacgacaccaaagctgatggctctatcgactacagcaacatcactctcggtggcggcaatagcggtacgactcgcatcagcaacgtttctgctggcgtgaacaacaacgacgcagtgaactatgcgcagttgaagcaaagtgtgcaggaaacgaagcaatacaccgatcagcgcatggttgagatggataacaaactgtccaaaactgaaagcaagctgagtggtggtatcgcttctgcaatggcaatgaccggtctgccgcaggcttacacgccgggtgccagcatggcctctattggtggcggtacttacaacggtgaatcggctgttgctttaggtgtgtcgatggtgagcgccaatggtcgttgggtctacaaattacaaggtagtaccaatagccagggtgaatactccgccgcactcggtgccggtattcagtgg

SEQ ID NO: 749 - protein, 1778 aa, Escherichia coli
MNKIFKVIWNPATGSYTVASETAKSRGKKSGRSKLLISALVAGGLLSSFGASADNYTGQPTDYGDGSAGDGWVAIGKGAKANTFMNTSGASTALGYDAIAEGEYSSAIGSKTLATGGASMAFGVSAKAMGDRSVALGASSVANGDRSMAFGRYAKTNGFTSLAIGDSSLADGEKTIALGNTAKAYEIMSIALGDNANASKEYAMALGASSKAGGADSLAFGRKSTANSTGSLAIGADSSSSNDNAIAIGNKTQALGVNSMALGNASQASGESSIALGNTSEASEQNAIALGQGSIASKVNSIALGSNSLSSGENAIALGEGSAAGGSNSLAFGSQSRANGNDSVAIGVGAAAATDNSVAIGAGSTTDASNTVSVGNSATKRKIVNMAAGAISNTSTDAINGSQLYTISDSVAKRLGGGATVGSDGTVTAVSYALRSGTYNNVGDALSGIDNNTLQWNKTAGAFSANHGANATNKITNVAKGTVSATSTDVVNGSQLYDLQQDALLWNGTAFSAAHGTEATSKITNVTAGNLTAGSTDAVNGSQLKTTNDNVTTNTTNIATNTTNITNLTDAVNGLGDDSLLWNKAAGAFSAAHGTEATSKITNVTAGNLTAGSTDAVNGSQLKTTNDNVTTNTTNIATNTTNITNLTDAVNGLGDDSLLWNKTAGAFSAAHGTDATSKITNVTAGNLTAGSTDAVNGSQLKTTNDNVTTNTTNIATNTTNITNLTDAVNGLGDDSLLWNKTAGAFSAAHGTDATSKITNVKAGDLTAGSTDAVNGSQLKTTNDNVSTNTTNITNLTDAVNGLGDDSLLWNKTAGAFSAAHGTDATSKITNVKAGDLTAGSTDAVNGSQLKTTNDNVSTNTTNITNLTDSVGDLKDDSLLWNKAAGAFSAAHGTEATSKITNLLAGKISSNSTDAINGSQLYGVADSFTSYLGGGADISDTGVLSGPTYTIGGTDYTNVGDALAAINTSFSTSLGDALLWDATAGKFSAKHGINNAPSVITDVANGAVSSTSSDAINGSQLYGVSDYIADALGGNAVVNTDGSITTPTYAIAGGSYNNVGDALEAIDTTLDDALLWDTTANGGNGAFSAAHGKDKTASVITNVANGAVSATSNDAINGSQLYSTNKYIADALGGDAEVNADGTITAPTYTIANTDYNNVGEALDALDNNALLWDEDAGAYNASHDGNASKITNVAAGDLSTTSTDAVNGSQLNATNILVTQNSQMINQLAGNTSETYIEENGAGINYVRTNDSGLAFNDASASGIGATAVGYNAVASHASSVAIGQDSISEVDTGIALGSSSVSSRVIVKGTRNTSVSEEGVVIGYDTTDGELLGALSIGDDGKYRQIINVADGSEAHDAVTVRQLQNAIGAVATTPTKYYHANSTAEDSLAVGEDSLAMGAKTIVNGNAGIGIGLNTLVLADAINGIAIGSNARANHADSIAMGNGSQTTRGAQTNYTAYNMDAPQNSVGEFSVGSEDGQRQITNVAAGSADTDAVNVGQLKVTDAQVSQNTQSITNLNTQVTNLDTRVTNIENGIGDIVTTGSTKYFKTNTDGADANAQGKDSVAIGSGSIAAADNSVALGTGSVADEENTISVGSSTNQRRITNVAAGVNATDAVNVSQLKSSEAGGVRYDTKADGSIDYSNITLGGGNSGTTRISNVSAGVNNNDAVNYAQLKQSVQETKQYTDQRMVEMDNKLSKTESKLSGGIASAMAMTGLPQAYTPGASMASIGGGTYNGESAVALGVSMVSANGRWVYKLQGSTNSQGEYSAALGAGIQW

SEQ ID NO: 750 - DNA, 8184 bp, Escherichia coli
tgaacaaaacgccggatgtctcccggctctgaaattaaggcttcggttatttgcacgaaatgttccttttcaaaccctgttgaattttgttaagccggtgcagacacacggaaaacgcacatcaacaccggacggtacgatacaaacaccagtgactggcgggacgaagggaatgacgaatcagtcaggaaatgatgacaaacagttggcagaccagaggagtcacagaaagatgacgggagtgtcgccagcatcggggacagggctgatttccgcaataccagcgccggcattgcaacacgtttcatgctgctgctcctcgtgattcctcaattcgctgctgcatccactgctccacttcacttttgtaccagcggctgctgcgccccagtttgatgggtttagggaaatgaccttcactgatcagcttgtaaaaccatttatcggtcataccggtgaaactggtgatgtagttcatgtcgatcaggggatcgtcggcacgcagtaacacgctgtcgtggcttgttgtggtcaacatggtcagaatgtcctttgtgagatttatgaagtttgtgcgaatgcagggaaagatgctgaaccgagctttcagaacggtcctgcagatccgggatagccgggattaccggcgaggcaacgggcttccggatcgcacacaccacgacgatcgcgggcgaaatcactgaacgcccatatcaactctttgaggatgttttcacagtccggtgaacgactgtccagcaccacatcccgggtgatctgcttctgatactgctttgcttcacccggtgacgcgaagcccagtacgttactccaggcatccagtatcaaccggtccaattcagggccatcgaaatactcctgtctgacgcacagcaccacgtggtattccggtttttcaggatgacgggtcaggagccagcagagatcacgtccgggggttgcattcatcagcgcactgacggtttcgataaaatccataccaaaccaggtcgttctgctgttgaaggtattgtcatattcacacggcagacgaagcaggatccgccgtatccgtgagccggactgctcacgcagcgcacgctcaaggacgccgacgactttgttctgataagatggccagaagggggccaggctatagtcgaaataagggatagcattcataagatatgctccgttatgcgcagcccacaatgcgtcctgcccgtgaataagctgacgtgttatggtttgcggatggggttgatggaataagtgaagaaccgaagcagaacgggaagataagggaaagaacactggatgcaggttcagggggaatgatctccgttgacttcggttcacatcattaatcatcccggtaagtttttaccgacggagtgtttccaggagcggaagcagataaaaataccgtttcatgacttcagggctattagcagaaaacgatctaagggcgttggctgacgcccttaccgtgacatacactctggtaccggatgccgttttacagggctcacctgccatccagtagacgccctgccccacgactgcaaccataattacgttgcccagaaccgtcatgctgcttcgtctcatatttcacgagataactggctctgttccgggctttctgcatcgcttccacatcaccacgcttgacccagagcacagcggatccaccagactttttgtctgaagccttcctggtttcagaacatccacccgacaaaggcgtatcatcggaagaagggcgagcatcagatgatgtcggtttacggaaaggcgtccgcctggaaaaatgaaccagtccattaccctgccagggctcgagatgcagagcactgcaccatgccagttggatcagcgtcgccagcgaagaaggaacggtgaaatcccctggcgagcaccaggtatctttgttgagcagtaatatcacgtgataatgtttcctgcctttttccttgccaaactcccgacaccagaaataacgcagagtggttgcacgcacacgcttgttggcacgtcgtttatgtcgctggtaagcctgaatttttgctttcagggattcgaaaaaacgagaaatcaccgctgaatctaaatcggtatccataatggtggcaggcatatactcagggaaacgtaaatccacccggattaacgagacggcacggtgttgcgccagggcactgttgagaatacttttcaaaacgggataaccagtaagcattgtgtattggttgattcatgatgagagatctccattgatttggattgacttcacatcattaatcaccgcggtaaaactttacgaactcccaccattgagcaacacaacctactcggataaaaatggaatcccctacaaacgaaaagatgggaaaaaacacaacaccagcaaatgatttaaaaacggcatggacgacgagaaaagtcagaagggaaacggatcaacagaacgtgcaaacaaaacatcaaaaacgcaatcagaacgatttctggcgctgtgaatcaacaacaacaccaaaacctatagcttaaccacacaactcaatcacagagccgaatagcgcgtttaaaacctgtttacagataaccccaccccaagaacaaaaaccactaacatcagaatcgattttctcatcctgaaaatgttacgtttcactacgcaccataaaagcgattaaccatcgataacgtaaacctcatctgaatcaaaacaccagaaccaatcatcacgctttttctgaaaagagccttgctctgagaaaaaaaaacaccagggccagttaatcatctcatcaacctcatcgctacaaaatcatccataaaaccatttaactaaatcgtcgtaagcactccgtaaatcacgccaggttatctcagccggatttgcgtttttacataaagacacttgtctcaggttaacgactaaaaacacaaaaactaagaaaaggttaaacgtaacttcagaaaaatagaatatcatcctgattacttaaacaagaaaaattgttttgtagcagctttaaactgattttagctaacgtaaagatttactaaactggatgtgtatcagatcaaacaatgtgtacagcaatgcttaatgaaaacacttgtagaattgtttatgaaaatgcgtgtatgtctggtaaaacacttagtagaaaatacgtgtataacacttactgaaatgcttagtaaaaatacttataaaatatgtgtatatagtatcataccgacattagcaacattctcagacactcatgcagactgaatgttgattacccgttttcacatcaggcatggttctttactgatcaaaaaacaaactgatttactcttgaattattttctctacctcaaaaaacatggtctcaggaatctgctatggtttcatagtttctgttgttcttttcataaaagttataagtcattgtcataatcatacgataatcactttatgttagtttttactgtcacacgctactgactttttcagtcattgccagaaaggggctctttttacttccatttcaccactcaacaaatgcaaaacttgtccagtaaagcggaccacctcttgctcacaagcaacgaatcatctccaggaacagccctcaaacattgcagaaacaaaaacaacaaaaccctcattatcactgatgttcggaaaatttcccggaacaaaaaaacgaaatcaaaatgagactcattatcatggatgtagtcaaaaagacgttatggtggctttcagttaaatggtactatttctcataaatccacttaactttttttactgattcatcccagataaccactttatcagtaaaaaatgaattatatagattaacgagtttttctgtttcagttattcccaatgtattatgtatcagttgtagatatgcttttatccagatttctttaccctccctccacttatctataaagctttccagcttacttaatcgttgatttataaaaaacgaatcaatatcatgaaaaagctcaacaagaaaacagcacgagacaatctcaacaaaaaacaaattctccttaaaagtattataaaaccttatcaacacataacgaaaaacacctcctgttaatctttcctgttcataaaacaacaaaccaaaaacaggaggaaatcttttaaccacaccacttttaatccagtaaggatgatgattagtctttactggcaatgaataaaagaacaattcggtttctcttttcccaccacaaacagacaaaactgtcttataaagactttttgaatcattatgtcctgataccccagacgaattagcagagtattttctttttactttttgccttaatggagctggaagaataataaaacgggatggcagataacaatcgctttcagaagaccggcattcgcacacatgaagatttatatttacatccggacaattcaaaaaccacacagaataattatcgcaccgtttgcaatatgaaacccatgaataaattgcataaagttcagaaagcgcatctaactctgcttttgaattaaatgtgataccgtttcttcgaattctcgtttccagcgttctccatgccggggttttcagtatctcacgaacttttttattaagttcagccagagatggtccctgctcctgtttatgtttcgtcctgctgttaatgatttctctttcttttactaatttcctctttctttttgggccttctacctttcttggcaatgcttcatttaatctgtgaacaggattttgctctcttctttttttgagctcacaaaacctctcataatgttttctgcacagtcttttctccactgccatttttactgagaaaacctgattgttacaattttttctgacacatttgtttttacgtccggtcatcctctcatctcctgaaacagcagtatgtcattagttcccgttctgaaaaactgacgccatactccattacactttaacaataatgtccgtaattcagacattccatcatttttcacgcccatattacctgaatgataaaccggattagtgtgatccggttcagtgaaatcaacaggataccggtatgtcattcagccattcttccctctccgcacaagtgaaatcatatctgacgtttcttcctgaagaaattcgtcagaaaattcttgaacatctccacagcgttattcattacgaacccgtgattggcattatgggtaaatccggcaccggcaaaagtagcctgtgtaatgctatttttcagtcccatatctgtgccacgcatcccctgaacggctgcacccgccaggctcatcgtcttaccctgcagatcggtgaacgcagaatgacgctggtcgatctgcccggcattggagagacaccgcagcatgatcaggaataccgggagctttaccgtcagttactgccggaactggatctgattatctggatcctgcgggctgatgaacgtgcgtatgctgccgatattgccatgcatcagtttttactgaatgaaggtgcagatccctcgcgttttctgtttgttctcagccatgccgatcgcgtgtttcctgctgaagaatggaatgccacagaaaaatgcccatcccgtcaccaggaactctcactggcaactgttacagccagggtggcaaccctgttcccgtcatcatttccggtactccccgttgctgcgcctgtcggctggaatcttccggcgtttgtgtcgctgatgatccacgccctgccaccgcaggcaaccagtgcggtttattcacatatccggggggaaaaccgctctgaacaggcccagaaacacgcacaacagacttttggtgacgccatcgggaaaagttttgacgacgccgttgcccggttcacttttccggtctggatgttacagcttctgcgtaaagcccgggaccgcattatccgcctgctggaaacactgtgggatcgtctgttctgacacactcacgccgacaggatgtgtcgctggattaacgagtattcttctttttatgaaatcatcattaaaaatcagataattaaaggaatattttttctgctgcattttattcctgattattcagatacgacacatcctttcaacaccatgaggcataataacatcatgaaataaaagatgttttcttacggagtacacatctatgtctgatgatcgttcccggcatgatcgtctggcggttcgcttatcactcattatcagccgactgatggccggagaatctctgtcactaaagacactgtcagatgaatttggcgttacagaacgtactttacagcgcgattttcatcagcgtctggttcacctggatttagagtacagaaatggcaggtacagcctcagacgacagagcagcccgtgtgcgatccctgaaatgctttcttttatacagaataccgggatcgcacggatacttccgctccggaacggacgactgataacctgtcttaccgacaaccaggagccctctccctgccttatctggctaccggcgccggatatcactgcaacgttccccgagtgtttctcgcaactcatcctggcaataagacagtgtatccacatctctctgatgactgagcgatggtatccgtcactggagccctgccggctcatttattacagcggtagctggtatctgatcgcgttacagaagggaaaactgcaggtctttcctctggcagatatcaaatcagtcagcctgacatcagaacggtttgaacggagaggccacatccacagtctggtcgctgaagagcgttttatctccgccctgccacatttctctttcatccataaacttatcaacacctttaacctgtgatcgccggcctgccaaagccgtcccgacaggtatggagacaatatgttgaacagaaaactaaatatacggctacgtcattccctgaacagtcactgcataccttccatcattatcaataacaccgtacgttcatttcagaggtcagtcatgaataccagagctctttttcccctgctgttcactgtggcatcattctccgcctccgccggcaactgggctgtcaaaaacggctggtgtcagaccatgacggaagatggtcaggcgctggtaatgctgaaaaatggcacgattggtattaccggcctgatgcagggatgcccgaatggcgtacagacgctcctgggcagccgtatcagtattaacggtaacctgatccccacatcacaaatgtgtaatcagcagacgggattcagggctgttgaggtggaaatcggacaggcgccggaaatggtcaaaaaagccgttcactccatagcagagcgtgatgtgtccgttttacaggcatttggtgtacgaatggaattcacccgcggtgatatgctgaaggtctgtccgaaatttgtcacatcacttgccggtttttccccgaaacagacgaccactattaataaagattccgtcctgcaggcagcccggcaggcatacgcccgggaatatgacgaggaaacaacagaaaccgctgattttggctcttacgaagtaaaaggcaataaggttgagtttgaagtattcaatcctgaagaccgtgcgtacgacaaagtgaccgtcacggttggtgctgacggtaatgccaccggcgccagcgttgaatttatcggaaaatagccggtatgtcggactgccaccctgttttattgcccgaaggccctttctcacgcgaacaggcggttgccgtcacaacagcttaccgcaatgtgcttattgaagatgaccagggaacgcatttccggctggttatccgcaatgccgaagggcagctacgctggcggtgctggaattttgaacctgatgccggaaaacagctaaattcgtatctcgccagtgagggaattctcaggcaataaacgtcttcatttcatccatcaggccgcgtcttctccgggagacgcggccttttcgtttataccgctaattcattcataaggagcaaagtatgcaattagccagtcgttttggtcatgtaaatcagatccgtcgggagcgcccactgacacgcgaagaactgatgtaccacgtcccgagtatttttggagaagaccggcacacctcccgcagtgaacggtatgcgtacattcccaccatcaccgtcctggaaaatctgc

SEQ ID NO: 751 - DNA, 882 bp, Escherichia coli
atgtcattcagccattcttccctctccgcacaagtgaaatcatatctgacgtttcttcctgaagaaattcgtcagaaaattcttgaacatctccacagcgttattcattacgaacccgtgattggcattatgggtaaatccggcaccggcaaaagtagcctgtgtaatgctatttttcagtcccatatctgtgccacgcatcccctgaacggctgcacccgccaggctcatcgtcttaccctgcagatcggtgaacgcagaatgacgctggtcgatctgcccggcattggagagacaccgcagcatgatcaggaataccgggagctttaccgtcagttactgccggaactggatctgattatctggatcctgcgggctgatgaacgtgcgtatgctgccgatattgccatgcatcagtttttactgaatgaaggtgcagatccctcgcgttttctgtttgttctcagccatgccgatcgcgtgtttcctgctgaagaatggaatgccacagaaaaatgcccatcccgtcaccaggaactctcactggcaactgttacagccagggtggcaaccctgttcccgtcatcatttccggtactccccgttgctgcgcctgtcggctggaatcttccggcgtttgtgtcgctgatgatccacgccctgccaccgcaggcaaccagtgcggtttattcacatatccggggggaaaaccgctctgaacaggcccagaaacacgcacaacagacttttggtgacgccatcgggaaaagttttgacgacgccgttgcccggttcacttttccggtctggatgttacagcttctgcgtaaagcccgggaccgcattatccgcctgctggaaacactgtgggatcgtctgttc

SEQ ID NO: 752 - protein, 294 aa, Escherichia coli
MSFSHSSLSAQVKSYLTFLPEEIRQKILEHLHSVIHYEPVIGIMGKSGTGKSSLCNAIFQSHICATHPLNGCTRQAHRLTLQIGERRMTLVDLPGIGETPQHDQEYRELYRQLLPELDLIIWILRADERAYAADIAMHQFLLNEGADPSRFLFVLSHADRVFPAEEWNATEKCPSRHQELSLATVTARVATLFPSSFPVLPVAAPVGWNLPAFVSLMIHALPPQATSAVYSHIRGENRSEQAQKHAQQTFGDAIGKSFDDAVARFTFPVWMLQLLRKARDRIIRLLETLWDRLF

SEQ ID NO: 753 - DNA, 678 bp, Escherichia coli
atgtctgatgatcgttcccggcatgatcgtctggcggttcgcttatcactcattatcagccgactgatggccggagaatctctgtcactaaagacactgtcagatgaatttggcgttacagaacgtactttacagcgcgattttcatcagcgtctggttcacctggatttagagtacagaaatggcaggtacagcctcagacgacagagcagcccgtgtgcgatccctgaaatgctttcttttatacagaataccgggatcgcacggatacttccgctccggaacggacgactgataacctgtcttaccgacaaccaggagccctctccctgccttatctggctaccggcgccggatatcactgcaacgttccccgagtgtttctcgcaactcatcctggcaataagacagtgtatccacatctctctgatgactgagcgatggtatccgtcactggagccctgccggctcatttattacagcggtagctggtatctgatcgcgttacagaagggaaaactgcaggtctttcctctggcagatatcaaatcagtcagcctgacatcagaacggtttgaacggagaggccacatccacagtctggtcgctgaagagcgttttatctccgccctgccacatttctctttcatccataaacttatcaacacctttaacctg

SEQ ID NO: 754 - protein, 226 aa, Escherichia coli
MSDDRSRHDRLAVRLSLIISRLMAGESLSLKTLSDEFGVTERTLQRDFHQRLVHLDLEYRNGRYSLRRQSSPCAIPEMLSFIQNTGIARILPLRNGRLITCLTDNQEPSPCLIWLPAPDITATFPECFSQLILAIRQCIHISLMTERWYPSLEPCRLIYYSGSWYLIALQKGKLQVFPLADIKSVSLTSERFERRGHIHSLVAEERFISALPHFSFIHKLINTFNL

SEQ ID NO: 755 - DNA, 231 bp, Escherichia coli
atgtcggactgccaccctgttttattgcccgaaggccctttctcacgcgaacaggcggttgccgtcacaacagcttaccgcaatgtgcttattgaagatgaccagggaacgcatttccggctggttatccgcaatgccgaagggcagctacgctggcggtgctggaattttgaacctgatgccggaaaacagctaaattcgtatctcgccagtgagggaattctcaggcaa

SEQ ID NO: 756 - protein, 77 aa, Escherichia coli
MSDCHPVLLPEGPFSREQAVAVTTAYRNVLIEDDQGTHFRLVIRNAEGQLRWRCWNFEPDAGKQLNSYLASEGILRQ

SEQ ID NO: 757 - DNA, 780 bp, Escherichia coli
atgttgaacagaaaactaaatatacggctacgtcattccctgaacagtcactgcataccttccatcattatcaataacaccgtacgttcatttcagaggtcagtcatgaataccagagctctttttcccctgctgttcactgtggcatcattctccgcctccgccggcaactgggctgtcaaaaacggctggtgtcagaccatgacggaagatggtcaggcgctggtaatgctgaaaaatggcacgattggtattaccggcctgatgcagggatgcccgaatggcgtacagacgctcctgggcagccgtatcagtattaacggtaacctgatccccacatcacaaatgtgtaatcagcagacgggattcagggctgttgaggtggaaatcggacaggcgccggaaatggtcaaaaaagccgttcactccatagcagagcgtgatgtgtccgttttacaggcatttggtgtacgaatggaattcacccgcggtgatatgctgaaggtctgtccgaaatttgtcacatcacttgccggtttttccccgaaacagacgaccactattaataaagattccgtcctgcaggcagcccggcaggcatacgcccgggaatatgacgaggaaacaacagaaaccgctgattttggctcttacgaagtaaaaggcaataaggttgagtttgaagtattcaatcctgaagaccgtgcgtacgacaaagtgaccgtcacggttggtgctgacggtaatgccaccggcgccagcgttgaatttatcggaaaa

SEQ ID NO: 758 - protein, 260 aa, Escherichia coli
MLNRKLNIRLRHSLNSHCIPSIIINNTVRSFQRSVMNTRALFPLLFTVASFSASAGNWAVKNGWCQTMTEDGQALVMLKNGTIGITGLMQGCPNGVQTLLGSRISINGNLIPTSQMCNQQTGFRAVEVEIGQAPEMVKKAVHSIAERDVSVLQAFGVRMEFTRGDMLKVCPKFVTSLAGFSPKQTTTINKDSVLQAARQAYAREYDEETTETADFGSYEVKGNKVEFEVFNPEDRAYDKVTVTVGADGNATGASVEFIGK

SEQ ID NO: 759 - DNA, 711 bp, Escherichia coli
atgcttactggttatcccgttttgaaaagtattctcaacagtgccctggcgcaacaccgtgccgtctcgttaatccgggtggatttacgtttccctgagtatatgcctgccaccattatggataccgatttagattcagcggtgatttctcgttttttcgaatccctgaaagcaaaaattcaggcttaccagcgacataaacgacgtgccaacaagcgtgtgcgtgcaaccactctgcgttatttctggtgtcgggagtttggcaaggaaaaaggcaggaaacattatcacgtgatattactgctcaacaaagatacctggtgctcgccaggggatttcaccgttccttcttcgctggcgacgctgatccaactggcatggtgcagtgctctgcatctcgagccctggcagggtaatggactggttcatttttccaggcggacgcctttccgtaaaccgacatcatctgatgctcgcccttcttccgatgatacgcctttgtcgggtggatgttctgaaaccaggaaggcttcagacaaaaagtctggtggatccgctgtgctctgggtcaagcgtggtgatgtggaagcgatgcagaaagcccggaacagagccagttatctcgtgaaatatgagacgaagcagcatgacggttctgggcaacgtaattatggttgcagtcgtggggcagggcgtctactggatggcagg

SEQ ID NO: 760 - protein, 237 aa, Escherichia coli
MLTGYPVLKSILNSALAQHRAVSLIRVDLRFPEYMPATIMDTDLDSAVISRFFESLKAKIQAYQRHKRRANKRVRATTLRYFWCREFGKEKGRKHYHVILLLNKDTWCSPGDFTVPSSLATLIQLAWCSALHLEPWQGNGLVHFSRRTPFRKPTSSDARPSSDDTPLSGGCSETRKASDKKSGGSAVLWVKRGDVEAMQKARNRASYLVKYETKQHDGSGQRNYGCSRGAGRLLDGR

SEQ ID NO: 761 - DNA, 762 bp, Escherichia coli
atgattaatgatgtgaaccgaagtcaacggagatcattccccctgaacctgcatccagtgttctttcccttatcttcccgttctgcttcggttcttcacttattccatcaaccccatccgcaaaccataacacgtcagcttattcacgggcaggacgcattgtgggctgcgcataacggagcatatcttatgaatgctatcccttatttcgactatagcctggcccccttctggccatcttatcagaacaaagtcgtcggcgtccttgagcgtgcgctgcgtgagcagtccggctcacggatacggcggatcctgcttcgtctgccgtgtgaatatgacaataccttcaacagcagaacgacctggtttggtatggattttatcgaaaccgtcagtgcgctgatgaatgcaacccccggacgtgatctctgctggctcctgacccgtcatcctgaaaaaccggaataccacgtggtgctgtgcgtcagacaggagtatttcgatggccctgaattggaccggttgatactggatgcctggagtaacgtactgggcttcgcgtcaccgggtgaagcaaagcagtatcagaagcagatcacccgggatgtggtgctggacagtcgttcaccggactgtgaaaacatcctcaaagagttgatatgggcgttcagtgatttcgcccgcgatcgtcgtggtgtgtgcgatccggaagcccgttgcctcgccggtaatcccggctatcccggatctgcaggaccgttc

SEQ ID NO: 762 - protein, 254 aa, Escherichia coli
MINDVNRSQRRSFPLNLHPVFFPLSSRSASVLHLFHQPHPQTITRQLIHGQDALWAAHNGAYLMNAIPYFDYSLAPFWPSYQNKVVGVLERALREQSGSRIRRILLRLPCEYDNTFNSRTTWFGMDFIETVSALMNATPGRDLCWLLTRHPEKPEYHVVLCVRQEYFDGPELDRLILDAWSNVLGFASPGEAKQYQKQITRDVVLDSRSPDCENILKELIWAFSDFARDRRGVCDPEARCLAGNPGYPGSAGPF

SEQ ID NO: 763 - DNA, 1128 bp, Escherichia coli
atgaccggacgtaaaaacaaatgtgtcagaaaaaattgtaacaatcaggttttctcagtaaaaatggcagtggagaaaagactgtgcagaaaacattatgagaggttttgtgagctcaaaaaaagaagagagcaaaatcctgttcacagattaaatgaagcattgccaagaaaggtagaaggcccaaaaagaaagaggaaattagtaaaagaaagagaaatcattaacagcaggacgaaacataaacaggagcagggaccatctctggctgaacttaataaaaaagttcgtgagatactgaaaaccccggcatggagaacgctggaaacgagaattcgaagaaacggtatcacatttaattcaaaagcagagttagatgcgctttctgaactttatgcaatttattcatgggtttcatattgcaaacggtgcgataattattctgtgtggtttttgaattgtccggatgtaaatataaatcttcatgtgtgcgaatgccggtcttctgaaagcgattgttatctgccatcccgttttattattcttccagctccattaaggcaaaaagtaaaaagaaaatactctgctaattcgtctggggtatcaggacataatgattcaaaaagtctttataagacagttttgtctgtttgtggtgggaaaagagaaaccgaattgttcttttattcattgccagtaaagactaatcatcatccttactggattaaaagtggtgtggttaaaagatttcctcctgtttttggtttgttgttttatgaacaggaaagattaacaggaggtgtttttcgttatgtgttgataaggttttataatacttttaaggagaatttgttttttgttgagattgtctcgtgctgttttcttgttgagctttttcatgatattgattcgttttttataaatcaacgattaagtaagctggaaagctttatagataagtggagggagggtaaagaaatctggataaaagcatatctacaactgatacataatacattgggaataactgaaacagaaaaactcgttaatctatataattcattttttactgataaagtggttatctgggatgaatcagtaaaaaaagttaagtggatttatgagaaa

SEQ ID NO: 764 - protein, 376 aa, Escherichia coli
MTGRKNKCVRKNCNNQVFSVKMAVEKRLCRKHYERFCELKKRREQNPVHRLNEALPRKVEGPKRKRKLVKEREIINSRTKHKQEQGPSLAELNKKVREILKTPAWRTLETRIRRNGITFNSKAELDALSELYAIYSWVSYCKRCDNYSVWFLNCPDVNINLHVCECRSSESDCYLPSRFIILPAPLRQKVKRKYSANSSGVSGHNDSKSLYKTVLSVCGGKRETELFFYSLPVKTNHHPYWIKSGVVKRFPPVFGLLFYEQERLTGGVFRYVLIRFYNTFKENLFFVEIVSCCFLVELFHDIDSFFINQRLSKLESFIDKWREGKEIWIKAYLQLIHNTLGITETEKLVNLYNSFFTDKVVIWDESVKKVKWIYEK

SEQ ID NO: 765 - DNA, 2075 bp, Escherichia coli
tcagacatcacaatctcccgtccggaagtggtcaccgggcatacggacgttatctgctcaaccagtatccgccacattctggctgtacgaaagagtacactgctgcaaatcgacacacttatccggcaactggctgaaatatcagcaatgacagaaagtattggcggtaaagccaccccgggctgggccatgaaacaggattttcgctgcggctgctggctgatggagaaaccggaaaccgcaatgaaagccatcacacgcaatctcgatcgcgaaatctggcgtgacctgatgcaacgttcagggatgctttccttaatggatgcacaggcccgtgatacatggtaccggtcactggagtacgataattttccggaaatcagtgaagcgaacattctgatcacatttgaacaactacaccagaataaggatgaggtgtttgagcgaggggtgatcaacgtcttcaggggactgagctggaattacaaaaccaattgcccctgcaaatttggcagtaaaattatcgtcaacaacctggtgaggtgggaccggtgggggtttcatcttatcaccgggcaacagactgaccgactcgtcgacctggaaagaatgctacatctgttcagcggcaaaccgatccccgacaaccgggaaaacatcactattcgtctggatgatcacatccggtctgttcagggtaaagaatgctatgaagatgagatgttcagcatcagatactttaagaaaggctccgcgcacatcaggttcaggaaaccagaactggttgacaggctgaatgatattattgcgaaacactatccgggagtgttaccttcataataaagctctaagaattgattcgattgtgtattttagcttcattcccttacacaaagttatttgggggttcttatgggggttactcatttatccaacacagattaatcatttaaaatcaaaacattaacacccatattcgactcctgtgatcgccaaaatgcctcttcagtgatccccatcctgcttatttctgagcaacctgaccctgctgatgtatctggtagtatgacagagtgattcgtttttcttgccgagtgtacgaaaacgtcttccttgccaccgactatcaaccgtcactcaaaaaaacctctctttttttcaagctatcaagaataagttgcattttatctgcaccggacaccagccatccatatatggcttttacctgctacaaagatgaagaagtgcataaatgtgatgttaaaacaatcaaagaaaaattacatgcgcaataatttcactataacattataatccatggtgaaaataacactgcacaaggattgtcatcatcaaactcatcggaactattttttctgtcgtcattggtgtaatactgattgtaagtatcctttcaggagattatttttgccgtgtgggacatggaacttgtaaagcagccaaaagcgctaggcatttaattgaaagtaaagagaaaaacagaagtagtcgcgtcaaagtctttagcacgcatattaatttgagtcatccagcggcatcctggctagcaactcaaacttgcgctaacaatatattcaatctacttcaaaacaataatgccatttatttattcgaaaacgataataaaattgaactgcgaatggggtatgattcttttttctctattgaaacgattgataaaattaacaaagaaaacatcaaagaaataaaactaaaaaatgatacaacatatgtttcccttcctaatccaaccattttaataaccacgacatcaacacctgaacgacagttttctatttctgttctggatgatgataacaaagaaaatctacctaccgataccgcaccttgttttacaattggtattcctgatgaatatactaaagccatagagttattgaacattaaataattaaatttcatattgagtttttttaaataccatatgaataattgttatatgtcattatttcctccattcactaaaactgattgattactctactccctcaccgtcatcggtagtggtatccttaacgtatattgatgaaaag

SEQ ID NO: 766 - DNA, 330 bp, Escherichia coli
tcagacatcacaatctcccgtccggaagtggtcaccgggcatacggacgttatctgctcaaccagtatccgccacattctggctgtacgaaagagtacactgctgcaaatcgacacacttatccggcaactggctgaaatatcagcaatgacagaaagtattggcggtaaagccaccccgggctgggccatgaaacaggattttcgctgcggctgctggctgatggagaaaccggaaaccgcaatgaaagccatcacacgcaatctcgatcgcgaaatctggcgtgacctgatgcaacgttcagggatgctttccttaatggatgcacag

SEQ ID NO: 767 - protein, 110 aa, Escherichia coli
SDITISRPEVVTGHTDVICSTSIRHILAVRKSTLLQIDTLIRQLAEISAMTESIGGKATPGWAMKQDFRCGCWLMEKPETAMKAITRNLDREIWRDLMQRSGMLSLMDAQ

SEQ ID NO: 768 - DNA, 228 bp, Escherichia coli
atgaaacccccaccggtcccacctcaccaggttgttgacgataattttactgccaaatttgcaggggcaattggttttgtaattccactcagtcccctgaagacgttgatcacccctcgctcaaacacctcatccttattctggtgtagttgttcaaatgtgatcagaatgttcgcttcactgatttccggaaaattatcgtactccagtgaccggtaccatgtatca

SEQ ID NO: 769 - protein, 76 aa, Escherichia coli
MKPPPVPPHQVVDDNFTAKFAGAIGFVIPLSPLKTLITPRSNTSSLFWCSCSNVIRMFASLISGKLSYSSDRYHVS

SEQ ID NO: 770 - DNA, 183 bp, Escherichia coli
gtgaggtgggaccggtgggggtttcatcttatcaccgggcaacagactgaccgactcgtcgacctggaaagaatgctacatctgttcagcggcaaaccgatccccgacaaccgggaaaacatcactattcgtctggatgatcacatccggtctgttcagggtaaagaatgctatgaagatgag

SEQ ID NO: 771 - protein, 61 aa, Escherichia coli
VRWDRWGFHLITGQQTDRLVDLERMLHLFSGKPIPDNRENITIRLDDHIRSVQGKECYEDE

SEQ ID NO: 772 - DNA, 495 bp, Escherichia coli
gtgggacatggaacttgtaaagcagccaaaagcgctaggcatttaattgaaagtaaagagaaaaacagaagtagtcgcgtcaaagtctttagcacgcatattaatttgagtcatccagcggcatcctggctagcaactcaaacttgcgctaacaatatattcaatctacttcaaaacaataatgccatttatttattcgaaaacgataataaaattgaactgcgaatggggtatgattcttttttctctattgaaacgattgataaaattaacaaagaaaacatcaaagaaataaaactaaaaaatgatacaacatatgtttcccttcctaatccaaccattttaataaccacgacatcaacacctgaacgacagttttctatttctgttctggatgatgataacaaagaaaatctacctaccgataccgcaccttgttttacaattggtattcctgatgaatatactaaagccatagagttattgaacattaaa

SEQ ID NO: 773 - protein, 165 aa, Escherichia coli
VGHGTCKAAKSARHLIESKEKNRSSRVKVFSTHINLSHPAASWLATQTCANNIFNLLQNNNAIYLFENDNKIELRMGYDSFFSIETIDKINKENIKEIKLKNDTTYVSLPNPTILITTTSTPERQFSISVLDDDNKENLPTDTAPCFTIGIPDEYTKAIELLNIK

SEQ ID NO: 774 - DNA, 28816 bp, Escherichia coli
tattagaatgctgacaaaccgcaaagctgctattggcttgcggttttttcgtttttacgcttccttacccgtttcagtgaagcctgagacaatgagtaaaccgttaatatccctccatcaaagccatccatcttatttatatattaaacatataccccattaatgaatttcatttatatattctataaatcaatttattttggttatgttaacatttcaatatcacaacagggcgcaacgcttatataatcattgtacaaaaagcacacaactttttaattagtagaaaaattaataattttttgtgaaagcccggacaataagtttaatgaatatcttaataggctctcatactacccaatttcttaaaagtgcaaatttgtgaagcttatcctgttattattttaagtttcatgccaaattctctcaccagataatgccgccctcttccgaaaaataatcaagaggccaaacaatatctaaaatgatacaactgtatctattcccctgaaaaatacattattcatttgtatattttcctcatcattgctttttatttaaatcatccgataatcccctgaatataattatgtcaataaccatcagaaaaagtggatgatgaggaaaaggatatggccgacagtttccagaatgaagttcccgccgctcgtgtaaatatcaagcttgatctgcatacaggcaatgctaaaaagaaagttgaactccccctcaagcttcttgccgtaggcgattacagtaacggaaaagagcaacgtccgctgtccgaacgggacaaggttgatatcaataaaaacaacttcaacagcgtcatggctgagttttcgcctgcggttaatttaacagtagaagatacgctaaacggaaacggtaatgaacaaaatatcgcgcttgaatttaaaagcctgaaggattttgaacccgaacaggtagcaaaaaatattccgcaacttcgtgtattactcgctatgcgcaatttactacgtgacctgaaatccaatctgctggataacgcaacgtttcgccgtgaactggaaaatatcctgaaagacccgacgctcagttcagaactgcgtgatgaactggcgaaaattgcgccgcaggagaacgtttaacccgaacgcgtattcaggttaaaccggagaagaaaggatcactgaaaaggaaatgctgatgtctgtacaacaagaacatgccacctctgaaactgcaacactcaccaccactgagtccggcggcgtttatcagtccctgttcgataaaattaatttaaccccggtgtcttccattcaggaaatcgatttatggcaaaacagcgaaacgctggccgatgcctcacccgatgagcgcgtgacggcggcgattcacgttctgctttcctgtctggcgaaatcaggcgaggacgtggttaagctcgacaagagcctgctggattttcatatcgacgatctggatcagaaaatcagtaaacagcttgatgcggtcatgcaccaccctgaattccagaaagtcgagtcgctgtggcgtggtacatggttcgtcgtacagcgcactgattttcgcaaaaatgtcagaattgaattgctggatatcagcaaagagcatctgcgtcaggattttgatgattcaccggaaatcattcagagtggtttatatcgccatacatacattcaggagtacgatacgccgggtggcgaacctgtagcctcattaatatccagctatgaatttgataacagcccgcaggatattgccctgctgcgtaatatttccagagtgtctgccgcttcccatatgccttttatcggttctgtcggaccgaaattcttccttaaaaattcgatggaagaagtcgccgcgattaaagatatcggcaactactttgaccgcgcagaatatattaaatggaagtcgttccgcgatacggatgacagccgctatgtgggattagtgatgccgcgcgtgctgggccgtctgccctatgggccggacacggtgccggtacgcagctttaactatgtggaagaagtcaaaggcccggatcacgaaaaatacctgtggacaaacgcctcgttcgcctttgccgccaatatggtgaagagctttgtgaataatggctggtgcgtgcagatccgtggcccacaggcgggcggcgcagtggccgatctgccgatccatctttacgatctcggcaccggcaatcaggtcaaaattccgtccgaagtgatgatcccggaaacccgcgagtttgagttcgccaaccttggctttattccactctcttattacaaaaaccgcgattacgcctgctttttctcggcaaactccgcccagaaaccggcgctgtatgataccgctgacgccaccgccaacagccgtatcaacgcccgtttgccctatatcttcctgctgtcccgcattgctcactacctgaaaattattcagcgcgagaatatcggcaccaccaaagaccgccgcgtgctggaactggagcttaacacctggatccgcacgctggtgacggaaatgaccgatccgggcgatgaacttcaggcttcgcatccactgcgcgacgggaaagttatcgtcgaggacatagaggacaatccgggctttttccgcgtcagactctttgccgtgccgcatttccagatcgaagggatggacgtcaacctttctctggtttcccagatgccaaaagcaaaagcctgatcgggcggtggtgtgatgtatgaaaatttgtcgaccactgtgggctgaggggacattcctgtcttctcagcagtttcagcagcaggcccgctgggaagcgttcagcaatgacagcattgcgcagctttgtattcgccatccgtgggggatcgcaaacgtgctctttgaccgggatgccctggcgctcggaaagctgaaaacgcaggcagtacgcctgcgttttgctgatggtacgctgatcgattcagacgtgagtgacgttctgccgctcgcctgcgatctgcgcgcgctgaagaacgacagcgcgattgtcctgctggcgctgccgcttgcacatggtaacggcggtaatctcggtcagggtgagcagactgaaagaccgctgcgctatcgtcaggaatggcaaaaggtgcaggatatctacggcagtgacagtgaagatatggccgttgagcgtcatgcgctgtccctgcgctttgctcatgataacaatcaggattacatcacctgcccactggcgcgtctggtgcgggatgttcagggcaactggacacaggatgagagctatattccgccgttactggcgtttaacgcccatgacgggctggtacagcgtctggacacgctgctgttgcagctacgggccaaatgtcagcgcctgatggcgatgcgccgggaaagcaaccagcgtatggcggacttcgccgtcgccgatgtctccctgttctggctgcttaacgcgctgaactccgccgagccggtactgagtgatttcctgcgctacccggcggttcatcccgaactggtctggcgggagctggcgaggcttgccggtgcgctgctgacgttttcccttgaacataacgtcagcgccgttccgccctatgtccacgaatcgccgtccatcgtctttccgccacttttctccctgctcagcgaactgctggaagccagcctgccgtcacgggtgatcgcgctggatctggcgtccctgccgggcaaccgctggaaagcagacctgcacgatccgcgcctgcgggaagaggccgacttttacctgtccgttcgttcctctctgcctgcgcatcaggtactgcaccagctaccgctggtctgcaaaatcggtgcgcctgatgacgtcacgctgcttatcaatgtggcgctgaatggtgttccactggtgccgcttacctcagttccggcagcgctgccactgcggctggagaaccagtattttgcgctggatatgcacagtgacgcggctaaatcgatgctggagtccgggtgctgcatgatttatgcgccgggaacaatgggcgacctgaaacctgaactgtttgcggtgctgcgcacatgaaaaaagagacggatatcaatatcgacgcgctgctgcgcgacacgtttctgacggtggtggaactgcgtcagggaaccaccgtgcgtcacggtatggagctgtatcgccactgccagcggcaggtggaactggtccgcgaacgtctgaaagatgccggattcagtcgggagaacgtggagcacataacttacgcgcagtgcgccctgctggacgaaacggtcctgagccgtagcggcatggacgacggtcagaccatttggatgaaggatccactccagtcgcatttcttcaacaccctgcaggccggtgagctgctgtacgagcggatgaagcaggtgctacaggaacccgcccccgcgcaggccgtgctgacctgctttcaccgtgtcctgctgctgggatttcgcgggcgttatcaggatccggcagccccggagcgcgaccagcttatttcgacgctcaacgggcaggtcgcgccatttggtgtgctgccggaaacggcggtactgaacgtgccgttatccacccgtcagcaccctttgctgcattcgccatttttctggctggtaacactggcgctgctactggcgggcgtctggtgggggctacaccactggctgaatgtactggtggatgaactgctgccgcaaagcctgcgttaaagggagtcgtgagtgaggaacacgctgaaacaggccatcgtgctgtggggaatggtgttactgctggtgctgtggtcagtgtttatcagtccgtctggcgtgctgagatgggccggtgcggcggctatcgttctggcggttgccgcgttgttgatttatcggcgcaggcaggcgtggacggagatgaccggcgatgccgggttgtcatcgctgccgccggaaacctaccgacagccggtagtgctggtctgtggcggtctgtcggcgcacctgtccactgacagcccggtccgccaggtttcagaagggctgtatctgcatgttcctgatgaagaacagcttgtggcgcaggtggagcgattgctgacccttcgcccggcgtgggcatcgcagcttgccgtggcgtataccatcatgcccggcatacaccgggatgtggcggttctggccggacggctgcgacggttcgcccacagtatggcgacggtgcgtcgtcgggcaggcgtaaacgtcccctggcttctctggagcgggctgtccggctcgccgttgccggaaagagcgagttcaccgtggtttatctgtaccggcggcgaagttcaggtagcaacatccacagagaccaccatgcccgcgcagtggattgcacaatccggcgtacaggagcgcagtcagcgactctgttacctgctgaaagctgaaagcctgatgcagtggctgaatcttaatgtgctgacggcactgaacggcccggaggcgaaatgtccaccactggcgatgaccgtggggctggtcccctcgttgcctgcggtggataacaacctgtggcagttgtggatcaccgccagaaccggcctgacgccggatatcgcggacaccggcacagacgatgcgctgccattcccggatgccctgttacggcagttgccgcgtcagtcgggctttaccccgctgcgacgagcctgcgtgaccatgctgggcgtcaccaccgtggcgggtatcgccgcgctgtgcctgtcagccacggcaaatcgccagttattacggcaggtcggtgacgatctgcaccggttttatgccgtcccggtggaggaatttatcaccaaagcccgtcacctgtcggtgctgaaagacgatgcgaccatgctcgatgggtattaccgggaaggagaacccctgcgcctcggtctggggttataccccggcgaacgcatccgccagccggtattacgcgccattcgcgactggcgtccgcctgaacaaaaaatggaggtgacggcttcgcttcaggttcagaccgtgcgtcttgacagtatgtcgctgtttgacgtcggacaggcccgcctgaaagacggctcgacaaaagtgctggtggacgcactggtgaacatccgggcaaaaccgggctggctgatcctcgtggccggatataccgatgccaccggcgatgaaaaaagcaatcagcagttatcgctgcggcgtgccgaagcggtgcgcaactggatgctgcagaccagcgacatcccggccacctgttttgccgtacagggactgggcgagagccagcctgcggcgaccaacgacacgccacagggccgggcagtcaaccggcgtgtcgaaatcagtcttgttccgcgttctgacgcctgtcaggacgtgaaataaaacataccgccggaagaaggcggtgcttcaatcacactaacaaggagagtaattctcatggctattcctgcttatctctggctgaaagatgacggcggcgcggatatcaaaggttccgtggacgttcaggggcgcgaaggtagcatcgaagtggtggcgctggatcacgatgtgtacatcccgaccgacaataacaccggcaaactgaccggtacccgtactcacaagccttttacgtttaccaaagaaatcgatgcgtccagcccgtatctctacaaagctgtgaccaccggacagaccctgaaaacggcagaatttaagttttaccgcatcaacgatgccggtcaggaagtggagtacttcaacatcacgcttgataacgtcaagctggtcagagtcgctccgcttatgcacgacatcaaggatccttccagagagaagcataaccacctggaacgtattgagttccgctacgagaaaatcacctggacttacaaagacggcaacatcattcattccgactcgtggaatgagcgtccttccgcctgataactgcggcagacaggaaactgtctgcctttttgttgtgtgctttgtccagtgccgcaggcaccggtactgagcaaagcatacccacaatctggtgatacctgatgggcctgagtgaggtaacggctatgggcggtagcgtgcctgaacgcggatcgcaggaatacagaacacgataaggaaacccttctatgacaggaaatcaccccgccgcgctgctgcgtcggccttaacccatactgtgcacgggcgctggacgctgccgcctcactgtgtcagacccgcgcccatgcggaaataaccattgaacactggctgctgaaactgctggagcagggagaaggcgatatcacggtgattgcccgccgctatgaatgggatatcgacacgctctggcagtctctgctggcacatctggacaccttaccccgcccggtccgcgaacgtcctcaactttctgaaccgctggcagcgcttatccgacaggcgtggctgatagcgtcactggaaggcgacgatccacaaatccgcagccagcatctgctgatggcgctgacagaaaaaccgatgctgcccgcctgtaatgacctgtgggtattgctgagtctgagccgcgtgcagcttgagcggctgcgtcccctgctggatgcgcagtcggatgaatgtccggcacgtcagccacaggtcaccgaaccgctgacctctgcactgccggagacggcaacggcggacgcaccggcaaaaacgctgacggagaaacaggatgacgccctgctggcggtgcttaaccgctttaccgaagacgtgacggaaaaagcccgcagcgggcgaatcgacccggtattcgggcgcgacacggaaattcgccagatggtcgatatcctctcccgtcgccgcaaaaacaacccgattctggtgggagaaccgggggtgggcaaaaccgcgctggtggaagggctggcgctgcgtatcaccgaaggcaacgtgccggacagcctgaaaacggtgcatatccgcacactggacctcggtctgttacaggctggcgcgggcgttaaaggtgaatttgaacagcggctgaaaaatgtcatcgatgcagtgcagaaatcaccggagccggtactgctgtttattgatgaagcccataccattatcggtgcgggtaatcaggcaggcggcgcggatgcggcgaacctgctgaaaccggcactggcaaggggcgaactgcgcaccatcgcggcgaccacgtggagcgaatacaaacagtattttgagcgcgacgccgcgctggagcgccgcttccagatggttaaggttgacgagccggatgatgacaccgcctgcctgatgctcagggggctgaaagcccgctatgcgcagcaccacggcgtacatatgctggacagcgccattcagaccgccgtgcgcctgtcgcgccgctatctgaccggacgccagttgccggacaaggcggttgatttgctggataccgccggggcaagagtccgcatgagccttgacaccctgccggaaccgttgacgcagcttcatgtgcgactggcggcactggatattgagcgggaagcgattgagcaggacagcgtattttatcccgaagccagcccggagcggctggcggaactgaccgatttgcgtgatgagctacaggcagaagccgggcatctggaagcgcagtatcagcaggaaaaggcactggcgcagcagattatgacgttgcgtcaggaagggacagacagcactgaactgcaacagcaactgcgaacgcatcagggctttgcaccgctgctggcgctggatgtggacgcccgcgccgtcgccacggtggtggcggactggaccggcatcccgctatcttccctgctcaaggacgagcagagcgacctgctcagtatggaacagagtcttgaaaaccgcgttgtcgggcaaagcccggcgctctgcgccatcgcacagcggctgcgggcggctaagaccggcctcacgccggagaacggcccgcagggggtattcctgctgaccggccccagcggcaccggtaaaaccgaaactgcgctcacactggccgacactctgtttggcggtgaaaaatcccttatcaccatcaacctctccgaatatcaggagccgcataccgtctcccagcttaaggggtctcctccgggctacgttggctacggtcagggtggcgtactcaccgaagccgttcgcaaacgcccttacagcgtggtgctgctcgacgaagtggaaaaggcgcaccgcgacgtaatgaacctgttctatcaggtatttgaccggggctttatgcgcgacggcgaaggccgggaaattgacttccgcaacaccgtgattctgatgacggctaatctgggcagcgaccacatcatgcaactgctggaggaaaaaccggacgccacggacgcagacctgcatgaactgctgtatcccctgctgcgcgagcacttccagccagcactgatggcgcgttttcagacggtgatttaccgcccgctgggacaggaggcgatgcgcgccattgtggaaatgaaactggcgcaggtggcccgccgtcttcaccagcactatgggctggaaacggaaatcagtaacagcctgtacgacgccctgaccgccgcctgcctgctgccggacaccggtgcgcgtaatatcgacagcctgctgaaccagcaaatcctgccggtcttaagccagcagttgctggcgcagcaggccgtgcatcataagcctgcccgactgcggcttgactgggatgatgaagacgggattgtgctggaatttgatgagaaataatggaggctcttatgaacgtacagttcttcgaccacgcacaccacaagctcaaaattcgcggcctgcaaagtccggtggatgtgctgacctttgaaggccgcgagcaactgagtaccccgttccgctacgacattcagtttaccagcagcgataaagccatcgcgccggagtcggtgctgatgcaggatggcgcattcagcctgacggcaccgccggtacagggaatgccggtacagactgccctgcgcaccctgcacggcgtcattaccggctttaaacatctctcatcgtcacaggacgaagcccgttacgaagtgcgccttgaaccccgtatggcgctgcttacccgcagccgccagaacgccatctaccagaaccagacggtgccgcaaatcgtcgaaaaaatcctgcgcgagcggcaccagatgcgcggtcaggacttcgtgtttaacctcaaaagcgaatacccggcccgcgaacaggtgatgcagtacggtgaggacgacctgacgtttgtttcacgcctgctgtcagaggtgggtatctggttccgctttgccaccgacgcccggttgaaaatcgaagttatcgaattttacgacgaccagagcggctacgagcgcgggctgacgctgccgcttcgccatccttctgggctgtttgatggtgaaacggaagccgtatgggggctgaacaccgcgtacagcgtggtggaaaaaagtgtctccacgcgggactacaactaccgtgaagccacggcggaaatgaccacaggccagcatgacgccaccgggggcgataacaccacttacggcgaagcctaccactatgccgacaacttcctgcaacaaggcgataaagaggcagcggaaagcggcgcgttttatgcccgtatccgtcacgaacgctacctgaatgaacaggccattctcaaaggccagagcaccagttcactgctgatgccggggctggagataaaagttcagggcgacgacgcgcctgcggtgttccgcaagggcgtgctgattaccggcgtgacgaccagcgcggcgcgtgaccgcagctatgagctgacgttcacggcgataccgtactcagaacgctacggctaccgtccggcgctaatcccccgcccggtcatggccggaacgctcccggcgcgggtcaccagcacggtgaagaacgatatctatgcccatatcgacaaggacgggcgctaccgagtcaaccttgactttgaccgcgatacgtggaaaccgggttatgaaagcctgtgggtacgccagtcgcgcccgtatgcgggagacacctacggcctgcacctgccgctgctggcgggaacggaggtcagcatcgcctttgaggaaggcaacccggacaggccgtatatcgccggggtaaaacacgactcggcgcacaccgaccatgtgaccattcagaactacaagcgcaacgtgctgcgtaccccggccaacaacaaaatccggctggatgacgagcgcgggaaggagcatatcaaggtcagtaccgaatatggcggcaagagccagctaaacctcggccatcttgttgatgccgggaaagaacagcgtggcgaaggctttgaactgcgtaccgatctgtggggcgcggtgcgggcgaagaaagggatttttatcagcgctgatgcgcaggataaggcgcagggtcaggtgctggagatgcagccagctctggctcgcctttctgcagcgttggtgacaatggaatctctggctgccagtgcgcaacaggctcaggcactggcggcagatgtgagtcgtcagcagacgctgttgcagcaaaaaattgagcagttacagcaggaagtgctactgggtagcgcacctaagggcgtggcgcttgtcagcggtgaggatatgcagttgtctgccagcgataatctgactctgacagcaggtaagcaactggatattggcgtacagaaagactttacgctggcagcaggaaaacagctcagcttgtatagccgtgcgggagcaaagctctttagctcacataacgatattgatattcaggcgcaggggggaaatctgaccacctggtcaacacaggacacctatatatcgagtggtaaaaagctggtggtgacagcgcaggatgagttaacactgatttgtggcgggggctatatcaaaattaaaagtggcaatgtggagattggcggtccgggaaaactattggttaaaaatgccggtattaagaaagcaggctccggtagtatgcagggcgtgatgaagtcgtttgagcctgaaagtttcgatgaaaatttcattatttcgaatccagcatcaggtaagccgatagcaaatcaaaaatatgaaatacacatgccagatgggagtgttattgccgggataaccgatgcaatggggtattcctctcttgttgcgtcaaaagcatctgatgacctaaaaattattctgaaaaaatgatttcagggggaaatatgttgaaagaatggatgatatttacgtgcagtttattgactctggctggggcgtcactgcccctcagtggctgtatttccagaggccaggagtctatatccgaaggggcggcatttggggcagggatcctgcgcgaaccgggagcaacaaaaaaagccgacacgaaagacctcaatgtgccaccaccggtttatggtccgccgcaggtgatatttcgcattgatgacaaccgctatttcacgctagaaaattatacccactgcgagaacgggcagacgttttataataataaagcaaaaaacattcatgttaaaatattagacgcttcagggtatttatttaaaggccgcttattctggttatcaacgcgtgatgattttctggcctttcctgccacgttaaataccagacacgcttcctgtatggggtcgaataaaggctgtatgaatgcggtcattgtcactaccgatggtggaaaaagacgcagtggtgtgccatacggcagttatacccagaatccgaccggtgccacgagggattatgacatgctggtgatgaatgacggcttctacctgcttagatatcgggggggacagggcagatttagtccggtgatacttagatggattctcagtactgaagatagctctggtgttgtgcgttcagaagatgcttatgaattgttccgtcccggagaagaggtaccctccaccggtttttataaaatcgacctgtcacgtttttatcccaaaaacaacgttatggaaatgcagtgtgacaggacgctggagccagttcaaccttcagagagtaaaattcaatgagtaccaataaatcagagccaacccgaaaggtcgatgttcatcttacggataatggtactccttttgcctattcaatgacctctcataaaaatgtcaaagtccgtgcggaagttcaaccaccgctccagttacccggcttaattatttttgttcacggcgttaattctgaaggcgaatggtacgattatgctgagaggtcgttatgcgccggactcaatcagcgcctggggcttgaaggtgagcatggtcttaaggaaaacaactatgaaggaggtttctttgtcaacagcgataaaagtgagggtggttgggaacatacctacgaaatagagggttcccaaaagaaatgggtttcaggccccagaaaaataacaaaaggtggtgacggtcgttccccggttattcgtttttactggggctatcgtgcggcggataatgaaaccgatacatacgccattccgctaaaaaataaaaagggggacaactattatgaccttcccccggaatcgcgtaaagccaaaggcccttggttttggggcggcggtccgttccagaatggctgcaaccaactggtcagcctgtggagtaaaaccgggtttaataacaatccatccctgctgggggttccgcttccgttcagtactcaggtactgaacggcgaacgtgacaggctactaagcgacgccccaccaagacactattacgctcatgcggctggtcgtctggccaaattaattaaaaccattcgcaaccagcatccggaagacaccgttacggtgctgtcacacagtcaaggaacaatgattgcgctggcggcggcagccatcgaagcgccggatgcgctgtttgtgatgaactccccctatgcgctggagaatgaacctaccacctatatttcctacccgataaaggaaattatcagccgtaaggccagatcggcgacgtttgcccgatattgtcaaaaaggtagcggaaaacaaaacgcggctgaagcaacagggctgcgacaatctgctggcaggcatgagcagcgacggtaattcatggatcccggaaggtaaaacacataacggactaccggagcgggacaaccatggaacgacgtggatttattgtaatccccatgaccgagttatggggtcttcccccctgcgcagtattggctggcaggggctgccggatactaaagatggcacaccacataccttatttaaacaggctggagatacgctttatgttcgtatacttgggcgcaatacaccctgcggcggtacgccgaccgcacagacccatttcagtaatttgggtgatggcaaacccttctgggacagcacaacaacgctgttacagagggcaacgtggccggatccggacagcgggcagacattaactattaacgcgccgcaggtgccggaaccgctgacagctgaagaactaaagaattttgatcaagactatgcccgtgacgaaaagcaaagcggcggagcaggatatgcttacgggcagattaacccagagacgaaaaaacctgtcgataccgactatcgttattacatttcactgtatggctattttgaccggaagatggtgccgaaaaaagactcgggatactaccagtcagggccggggtcgaaagaggacagggtaaagtatgaaaagcagtcacaagaagagatgctggaggaggtaagaacctatgttcagcgtccaacagatcacagtaccctgccatcggatgagcgatttatgagccgggtggtggcctatgatttacccatcggttactgctggcattcgtgggacaaagcgggtctggaagagcttcgtcgtcaggctgactggctggaaagcgatgactattactttagtggcaagctgactgttccgccaataccgcctgcgataaaacaggatgtcgccgaagatgctgaacagagaaaggcagaagaaaaggcccggttacgtaatgtgtgaaacaaatacatggaaagtgatatgggaaaaaatgtggtagtactcaatgacgcaacttctcacggtggcaaagtctcttcggcctcttcaacctttgatattcagggaaaaaaggctgcactgctgaatgataccgtcacttgcccgaagcatggtactaacccaattgtggagtgtgataccagttatgaggagggtggacgtgggattgttgtgcatggctgtaaaagcgcctgcggctcggtggtgtatgccagtctgccggatgtggagataggctgatggggtggtcaaaaccgaaaattcccaccagcaaagacgtgcagcgctggtctccttgggtatgcctttttattctgtttgccggggcatttgtcgcgctcacatatgggatactgcattcccctgcggacggactccccgccctcgccagcggttactggttgcccttgacaggcaggatgatggctggagtgatgacagccctaaccggctatttgttgtggtgggagtttcaggcatattacgtctggtgctggaatagtcggcggcacagcgcactccttgtctggcagcagcgagcacatcagcaccgctacttagcctgccatgttctgctgacctcagacacgcaactgcttcctcgcctcgcaggtacttcttatgaagataataataatgatcctcctttaacattattggcagaggagccgctgatacccggtattgcgcgttttgagcaactttgccagttactgataaaccagattaaagcttctcttattcagcattatccttccggtcagatgactgtactgattgaaacctctgcatcggataaagagcgtgagcgaacaacccttattcgtttatggaaagaggatgaattaccctggatactggacatccatatgtcacccactccccttcctctcagtgatgagaataaccacttatttgatattgataaccctgttcttgttttggcgttgcactaccgccagccggaggaaaacctgccggaattcgccagcgcattgttactgttgccgcccgagttactgaaagtttctatacggcgggatacggtgcgggtgtttcgcccgatgccactaaacattgatgcgatctcccgtgagttgactgaactgcgggatatggcgcaacagccagtgaatgccagatatctggtctggcacagtggtctgacacaggcatcacaacaggctctgggccgtgtggtgaacgaccttccgttatccctgcataacgatatcgccactggcggaattattgatgtggataaagttatcgccgcttacgggcctcctgccggttggctgatggtggcaaccgccgcagagatggtcagatacgggccgggaagtcactggttgttacaggtcagaaataaacaggccagtgctgtggtgacgggcaacggctatccggcgattaatcaggaataccttgatacaacctcatctccttatcccgcaggttccctaatgctggcggttatgctcaatatactggtgctctggtttatcgggcggtacagccaggaatggctgttttcctgggcaggcgtagccatgacactgttgctgatgatagtgacattgccaggcatcgtctttggtttacgaagcgctgttgctcatctgcaataccctcgctttatacaggctatcgttcgcgcccagaaggaataatttgttatgaaaagagttgtgcgtcttttgggtgtggggttactgctccttgttgtgttgttgctcattttgtttgttctggctcagaccacaccgctgatatcagcacaggatgagcatgctgtctggcttcgtctgttgataacagcgattgtgatctgtttgctaagtatgtgcatatttttcctcttttctttccggcagaacgaagcctcgacgatatcactatacgctcaaccgactgatataaaggaaataaatacggagcagccgaactatgcatcactgctgacgatatatttacgcgaccgctacggtccgttctggcggcgtaaagtccgcctgctgctggtgaccggcgagcctgaacaggcagaagccatcgcgccggggctgaccgggcaacactggctggaaggcgaccacacggtgctgatatatggcggcaggccaacagcggagcctgatgtcacactgctgaccgccttaaaaaaactgcgccgcagccgtccgctggacggcatcatctgggcgctgacagaagaacagagccgccagacagcgcaactcgacaaaggctggcgcggactgataaacggcggtaagcgactcggttttcaggctccactctatttgtggcaggtctgtgacgacggtgattatcagaccggacgccccctgcaaagcgtcggctgcctgctgccggaacgctgtaccccggaacaactggctgtaatgctggaagcacaaccctgccgctgacggaacagggcatgtcgcagctactgaccgataaccgccatgattttctgctgcgtctggctcatacccttgcagagcggggtattgctcactggcagaccgtcctgaaaccgctgctggcaggcggcgcattttcttccctgcgcctgcgcggcctgatgttcagcccgccgcttgccgccgtgccggaggccagcacctcatgcagtggctgccgtcaccggtctgggcgggcgtgacgggtgataacgcgcgcgggcgcacggtgggttttcctgtggctgcgtaccgcactgatgtccgctgtctgcgtgctggtgatatggggggccggaatgacgacctcgttcttcgccaaccgcgctcttgttcaggaaaccggtatccagacggcacgtgcgcttgatacccgcctgccgctggcagaacaactggtggcgctgcataccctgcagggcgaactggaacgcctgcaatatcgtatccgcgaaggtgcgccgtggtatcagcgttttggccttgaacgtaaccaacaactgctcgccgccgcttttcccggctatgcgcaggcggcaaaccggctggtgcgcgacgtggccgttgaccatctgcaacagcaactgaacgcctttgtcgccctgccgcccaacagtcctcagcgtaccgccaccggtgaacaacgctataagcagcttaaggcattgctgatgacttcccgcccggaaaaggccgacgctgcctttttcagtaccacgctgatggcggacggtctgcgctacgagaatatcccggaaggtgtgcggcagagcgtgttgccgtcactgctgaccttctggacggcgaacctgccggaacacccgcagtggaaaacatcgccgccaccggaactgaccggcgcagtgcgtaaaatcctgctgcgccagattggtgtgcgtaatgccgaaaacaccctctaccagaacgtgctgcaacaggtgtcccgcaactacgccgatatgacgctggcggacatgaccggggataccctcaccgaatctcttttcagtacggaacagacggtgccggggatgttcacccgtcaggcgtgggaaggacaggtcagggaagccatcgagcaggtggtgacggcgcggcgcgaggaaatcgactgggtactcagcgaccgccagcaggatacctctgcggatatctcgccggatacgctgcgtaaccgtctcacctcacgctactttaccgactttgccggaagctggctggcgtttctcaacagcattcactggaaaaaggaagactcgctctccggcattctcgaccagctgacactgatggccgatgcccgtcagtcgccactgattgcgctgacggacaccctcgcgtggcaggcggcgacaggcagggaaaaccgtggtctgtcagactcgctggcgaaatcggcacaggaactgtttaacggcaaggagaaaacgccgcagcaatcccgtgaaggtgacgacgtgcctgtcgggccgctggataaaaccttcacgccgctgctgcgtttgctgggcgataaggccggaggcggcgacagccagctgagtctacagacctacctcacccgcgtcacccgcgtgcgcctcaaactgcaacaggtgaccaacgcccccgacccgcaggagatgacccaacaactggcgcagacggtcttacagggtaaaaccgttgacctcaccgacacccgcgactacggacggttaatcgccgccagtctgggcgaagaatggagtggcttcggtcaggcgctgttcgttcgcccggtagagcagtcgtggcggcaggtgctgacgcctgcggcggacagcctgaaccgccagtggcagcgggcgattgtcagccactggaatcaggacttcgctggccgctatccgttcaaagcctcacagaacgatgcctccctccccctgctggcgcagtacctgcgcgatgacgggcgcatcaacctgtttatcgccgccaacctttccggcgtgctgaaacgagagggccgctactgggtggctgacgccatgaacacgcaggggctgacggtcaatccggactttatccgcgccctgaaccgcctgcgcgacgtggccgataccgcctttgccagcggcgatgccgggatacattttgaactgcgggcaaaaccggcgcgtgacgtgatgaagacgcatctggtgattgacgggcaggagctggaatatttcaaccagaaagaacgctggcagcgttttaactggccggatgaacagtggcaacccggcgcatcgctaagctggaccagcacacaggcgatggagcgcatactggcggattaccggggaagctggagtcttattcgcctgctggaacaggcgcaggtgacgccggtggacagcagcacctttaaggtggtgtggaaagcgcaggacggcctgccgctgaattacctgctacgggttgaacagggtaaagggccgctggcgctgctggagctgaaaaacttccgcctgccgggacaggtgtttctgaccggaaaaagtatgaaggatgtggaagagtatggggaagacgccgatgagtgaactgttgcaaaagctgacccgtagctgttttgccgaccgggatgcactggatgtggcgcgaacacaggcggcgctgtggcagacatggctgctgccggtgacggcagatacgccggtcggggaagaccccggctaccacgacgattttctgcgtatccgcgacgagatgaacaaactttccggcgcggatacggacctcatctgccagcttgccgaatccctgctgctgacgcaggcaaaagacgtgcgcatcgccacttactacatctgggcgcgactgcaccgcgacggtgagcgcggactggcggaaggactggcgctgctgaccggactggtggaacgcttcggtacgcaactgctgccctcgcgcccggccagccggaaaatggcgctggagtggctggcgggggaaaagatgctcgacagccttgcccgctacccggaagtggcaaaagaggattttgcgaacattgttgccgccctgaatctgctgacggtttccttcgccgcgtggcccaagaccagcattccccctccctgatgccgctgattaacgcgctggaatcgcgtctggcacagtcggcggaatgaacgcggtggtgccgcagaacagcagcggcgttccggcaccgtcatccccggtggatgcgccgcaggtacagaccatcacctccggacgtgacctgctcgaccaggcgaaagtgctggcccgttatctgaacgaacagccgcagggctggctttcggcgcaccggctgatgaaaaccctgcgctgggatacggtgcatgaactgccgccggacgtggacggcaaaacccggctggccccgccgcgcaccgagtcacgcaaccagcttaagcggctgtatgcccagcagaactggacggaactgctggagcaggccgacctgatgttcagcaccggcgtcagtcatttctggctggacattcagtggtatctgcatcaggcgctgactaaggcgggcgtaccgtgggacaggtggacagccgttatccgtcaggacctggcgttactgctggaacgcctgccagggctggaaaatctggcatggaacgacggcacaccgttcgccgacgaggtgacgcgcaactggatagcgcagcaggtcatgatgcgggaagacggcgcatggcttgcggggaaagccgctgtaccgacagacgacgccacaaatgacgtactggcgctggagccggaagcactggcgatggcagacagtcagggcgtggaagcggcgctgggctggatacagacccgtccgggcatcaccacggcacgacaggcctgttattgcggctgctgatggcacgggtggcggaacagtacggtaaaaacgagatggcgctcctgctgctggaagaactggataccgccgcacagggaataacgctgacgcagtgggagccagaactgctgtttgaagtaaaagcccggcaactgaaactgctgcgcctgcgggcacatcgccacgcggacaaggcggcgcttgcccggaaaatggacgctctgctgggttcgctggtggcaatcgatccggcgcggacagcggtactgtgtgatacgcagcataaggactgatttcttatttgtatttcagattaaaggactttgatggacgacctgacccaacgctactatgaagccgaaatgcgctacctgcgtgaagcgggtaaagaatttgcgcaggcttaccccgaccgtgctgcgatgcttaatcttgataaacccggcgcacgcgatccctatgtggagcgcctgttcgagggcttcgcttttttaatgggccgcctgcgcgaaaagctggacgacgatctgccggaactgactgaagggctggtcagcctgctgtggccccactacctgcgaaccatcccgtcactttccgtggttgaactgtcgacagatcaccggcagatgaagcagagcgaaacgctgaaagagtttcaggtgctatcccgtcccatcggcgaacgcagaacccgctgcgtctacagtgccacgcgtgatatcacgctgcatccgctggcgttgccggacgtgtcattgcaatatgaaccggacggacgctcggttatccgtctgcgctttgcgtgcggcccgctggttggtgactggtcgcagatcgatttatcccgcctgccgctctatctcaatgccgacagcccggtagcctgtgcgttgcaccgggctttaacgcttggcacgcagcagttctggctgcgtctgccggggcaggaacgccgtgtgctggacgcgcacttttccccgatgggttttgatgacgatgaccgactgtggccgaaaggtgagtcagcgttcagcggctaccagttgttgctggaatatttcaccttccgtgagaagtttatgtttgtggcgctgaacgggctggagaacgtcatctggccggaaaggataaccggctttgagattgacgtggtgctggcggaaaactggcctcatgatttgccgtttaataccgacaatctccgcctgcactgcgtgccggtcatcaacctgttcccgctcgaagccgatccgttacacctttcgccgctggaaaacgaatttctgctgcgcccgatgcgcattcaggacgggcataccgagatttattccgtcgacaacattatttcttcgcgccataccggcagtcaggcgtatgtccccttctccagctttcgtcaccggggcgggatgctgcgccacgatgcgccggaacgctattaccacacgcgggtaaagcgcggcccttccggcctgcatgacacctggctgattctgggcggcgatgcatttgatactgaccggatgctggaggatgaaacgctctctttaagcctgaccggtactaacgggcagcttccccgtaaggctttacagagcacgctgctcgatacgccagttcatgcctcacagaacgtcctgcgggtgcgcaacctgtgcgctccgacgcagccctgctatccccctgcgcgtgaccgcttccactggcgggtgctcagtcaccttggttctaactttttatcgatgatggataacgccgaaattctgcgcggcacgctggcactgtacgactggaccgaaagcgagatgaaccgccgtcgtctggaggcgattgtcgacgttcagcacagcctgatacagcgttttgaaagaggctttctgctgcgtggcgtggatattcaggtgacgctggacagtaacggctttgccggagaaggtatatcacgctgtttggtaactgctgcaccgctttttcgcactgtatgccgatatccacttattcactcaactgaccttaattctgcaacccacaggaaagtgcctgcaatggacagagcatcacagccagcgcgtaccgggctgaccgaccggctggccccggatattgcgcggatcaatttttaccgtttttgccagttgctggaacagagccagcagaacgcgccgctgggcagtaccgacagccccgccaccgatgcggtgcgctttcgtcctcatcccggtatgggctttccggtcagcgagttaaaaaacgttgaacgtgacgcgggcaatcccgacgcgccccccacggtgcgcaccacctttctcggcctgtacggcgtggattcgccgctgcccaccgcctatctggactacattacccagcgtcatgacggacatgacgcagtgatggcgtttctcgatatttttaaccatcgctttattactcagtactaccgcatctggcgcaaatataactacccggcgtcgtttgaagcaggtgccgtggatgacatttcccgttgtctgctgggactcatcgggctgggtattcccggcagcgagaaccatatcgccacgccggtatcccgttttctggccctgctcagcgtgatgcgcctgccgacgcgcacggcggaaggcgtcacggcactggtagggctgcttgccccgctgaccaaagcgacggtggtgcctcacgatccgcagcctgtaattctcccggcccctgcgggtctgtcaaaaaattcacgcatcagcctgaaaacgcgaacgctgctggggcgtaccggtaccgacgccaacagccagttgctgctgaaactgtataccgaagatgccgcagaagcacgtggctggctgcccgacgggcaactgcacagcgatttgctggtgctgctgcgcgtttatctgggctggcgctgtcaggcccgtctgcaactgacgctgcccgtcagcctgttgcctgctgcccggctgggaaaacagcgtgtacagattagccgtaccggcatccttcgcgcctcctttgccgcgcccgcgaccggaacagtgacggtcagtctggggcgttatcagggattaatacccgctttttccattcgtaacagggagagtatgactcatgtttcctattcgttttaaacgtccggcgttgctctgtatggcgatgctgacggttgttctgagtggctgcggcctgattcagaaagtggtggatgaatcgaaaagcgtggcctcagccgttttctacaaacaaatcaaaatactgcatctcgatttcttctcccgcagcgccctgaatacggatgcggaagatacgccgctttccacgatggtgcatgtctggcaactgaaaacccgcgaagattttgacaaggcggattacgacaccctgtttatgcaggaagagaagacgctggagaaggacgtactggcaaaacacaccgtctgggtaaaaccggaaggcacggcatccctgaatgtgccgctggataaagagacgcagtttgtcgccattattgggcagttttatcaccctgatgaaaaaagcgacagctggcgtctggtgatcaaaagggacgaactggaggccgacaagccgcgctcgattgaactgatgagaagcgacctgcgactgctgcctctcaaggataaataaccgatgtcgacaccttccttatatgaaatgctgacgttcagtttcagcggcgagttaccgctggaacagatcagcgagcgggatcagcttatcctttccgtgatggacaatatgcaacgcattatcaactgccgggcaggcacgctggcgcatttgccggattacggtctgccggatctcagtctgatccatcaggggatggctgcgggtattcatggcctgatgcgtcagattgaagaaacactgctgcgttatgaaccacgcctgagtcagatacaggtggaattactcccccagccccgtccggggcatcttaattacctgatccacgcgcagcttcccgataccggctggatacgctttgatggcgtattttctccggaaggacgaattgttctgcgtcatctcaaacaacaggagcgggcgtactgatggcaagtaacgcgaattttatcagccagttcgtcatgggcggcgatccctgtacttataaggaatccggtgaactgcaggctgaaatgagtaaactgactcacccggcccgaccggatgtggactggcgtcaggtggaaaaactctgcctcgcgctgttccggcaaaatggcgtggaactacagacgctggtctgttacgtactggcgataaccagacggcaggggctggcagggatggcagacggactcggttcactggatatactgctccagcgctgggctgacttctggccggtacaggtacattccagaatatcactgctcagctgggtcacagaaaaaatgcagcaggcactgagaacgctggatattcagtatcaggatctgccgcagatctaccgttgtgtacagcatctttccgccatcgaaaccacgctgcaacagtgtgaactgtggcatatgacgaaactggatctactggccgggcagtttcgcaataccgcattgcgtctggaacggctggcgcctcagggagcggaaaccactatcactccccctgaattaccccgccgggaaatgaatcaaccgaaaaagtcagaggaaagtccacagccggtttttgcaaccagatccgttcagcaaaacgataaggatgccagtccacccgttccatcccctgaaatctcccggcagcggacatggccgatatttatggccggaatggttgtgatggccggtctcggcggaacaggattatggggctggtcgcagcttaatcagccggacgcgctaatccagcgaatacaactgtctgtcatgccgttgccgctgtcgctggagagcggcgaactggcaaagctggatgtaaaggataaggcgctgctggctcaggacagaacaattgcggcaagtcagatgcaactggagcagttaaacaaattgcctgcccgctggccactggagcagggatatcgccagctacgccagcttgatgccctgtggccggataatcctcaggtcagggcgctgaacgcgcagtggcgcaaacagcgggagctgagcgccctgtctgctgaggcactgaatggctatgctcaggcgcagagccagctacagcgcctgtcggcgcagctggatgcactggatgaacgtaaggggagatatctgaccggttcggaactaaaaacggcggtgtacggcatccggcagtcgttaaaggagccgccgctggaagaactgcttcggcaactggaagagcaaaaacagaccggagaggtttcgccaacgctgttgacgcaaattgatacccggttaaatcagttgttgaatcgctatgtcattttactggatacgaaggtggaacaaagtcagtaaacatcgggggatttatgtaccaataagggatatgtgaccttgccattttttaaaggagtctctgtgtacaaaaaaagagaggaacaggccattcgatctactcgttgattcacatcagataatgagtgtatatttcggtagatagcttgggttcgggaacagtgaataccttaagtttcaaaagattggattaacctcttgactgtggcccccgcaaccaatttattagaatgctgacaaaccgcaatgtgttctacaaattgcggtttttttgtatttaaaatctttgttcgctgaactcacaacacgttttttatctcccttcctgcgaagtaatcaattatcgactgggcaacgtgtatcccggtttgctggtatgactcaacggtggcggccgcgatatgcggcgttgtaatgatatttttggcatgtagcagtgggctaaattgcgccaacggttcagagctaaacacatccagcgccgcaaacacatttcgttcttcaatcacctgaagtaaagcgccctcatccagcaactttccccttgcgacattgatgagcagagcaccattgcgcatcatcgacaaatatttatgactaatgaagttctccagcccagaagaaaaaggcaaaagaacaatgatgacatgcgactgcataaagatatcttcaattgatacaaactgaactccagctttgtcagcaacctgatagtcgggttgtttgtcaaaagctaaaagctcaacatcaaaaccggataaccttttcgccagagttttacctatattaccgtagccaaccaggccaatccgtttcccttgtaattcacagccatgcgactcaccccagtagccattttgcatcgcatgatagctgccagggatatttctcatgctcgcgaagataagtccaatgataaattccgcaaccgcatttgaattaatcccaaccgcattattgacaacaataccggattgctgtgccgcacgaagatcaatattgtctatccccgtcccgaatctcgatattattctcacaccaggcagcaatgatagcgtgtccgcctgataaccatcttttccggcgatgaccgcgcaaatagattctcgtaatgcagtggattctgatttaagcagatgctccatattattcttaataataagattaaaattattctctcttagcaacttgctggcggaaacacagcgtgctgaaaagctggggacggtgaccagaacatttttcatagcggacactcacttcaaagaacgccaccccaaaagatggcgtgaccggttactgtatttatattttgaaattatgaatttgctttaatgccgagtgcacctcctggatgatataagccgaaatcagcacgagtaaattttttcaattcagagagtgcaagcgccaccgcatcaccaacaaccagaacaacagtcgacgagcatgacggtgctaaacctaaattatccgcctcacttttgacggggatttcaacagataaatcacaacttatcgcaagcgatgagtgatgactgcgggtaaaagagatcaaataattacccatttttttcaaactaggcagtgtcgccaggatttccgccgtctcaccactgtttgaaataagaataacaacatcgtctttcgccaccattccaaggtcgccgtgtaccgcttccgtaccgtgaacaaaaaacgagggagttccggtactggcaaaagttgctgcgagttttctggcaataataccggacttaccaacaccaataaaaacaacttttccctgacaagattgtaatactttaattaaattagcgaattcagaaagtggggaatcaataacctcttctactgctttaagttcgttatgcataaaatgtttaatgagatggataagatccgtgttattcat

SEQ ID NO: 775 - DNA, 519 bp, Escherichia coli
gtggatgatgaggaaaaggatatggccgacagtttccagaatgaagttcccgccgctcgtgtaaatatcaagcttgatctgcatacaggcaatgctaaaaagaaagttgaactccccctcaagcttcttgccgtaggcgattacagtaacggaaaagagcaacgtccgctgtccgaacgggacaaggttgatatcaataaaaacaacttcaacagcgtcatggctgagttttcgcctgcggttaatttaacagtagaagatacgctaaacggaaacggtaatgaacaaaatatcgcgcttgaatttaaaagcctgaaggattttgaacccgaacaggtagcaaaaaatattccgcaacttcgtgtattactcgctatgcgcaatttactacgtgacctgaaatccaatctgctggataacgcaacgtttcgccgtgaactggaaaatatcctgaaagacccgacgctcagttcagaactgcgtgatgaactggcgaaaattgcgccgcaggagaacgtt

SEQ ID NO: 776 - protein, 173 aa, Escherichia coli
VDDEEKDMADSFQNEVPAARVNIKLDLHTGNAKKKVELPLKLLAVGDYSNGKEQRPLSERDKVDINKNNFNSVMAEFSPAVNLTVEDTLNGNGNEQNIALEFKSLKDFEPEQVAKNIPQLRVLLAMRNLLRDLKSNLLDNATFRRELENILKDPTLSSELRDELAKIAPQENV

SEQ ID NO: 777 - DNA, 1542 bp, Escherichia coli
atgctgatgtctgtacaacaagaacatgccacctctgaaactgcaacactcaccaccactgagtccggcggcgtttatcagtccctgttcgataaaattaatttaaccccggtgtcttccattcaggaaatcgatttatggcaaaacagcgaaacgctggccgatgcctcacccgatgagcgcgtgacggcggcgattcacgttctgctttcctgtctggcgaaatcaggcgaggacgtggttaagctcgacaagagcctgctggattttcatatcgacgatctggatcagaaaatcagtaaacagcttgatgcggtcatgcaccaccctgaattccagaaagtcgagtcgctgtggcgtggtacatggttcgtcgtacagcgcactgattttcgcaaaaatgtcagaattgaattgctggatatcagcaaagagcatctgcgtcaggattttgatgattcaccggaaatcattcagagtggtttatatcgccatacatacattcaggagtacgatacgccgggtggcgaacctgtagcctcattaatatccagctatgaatttgataacagcccgcaggatattgccctgctgcgtaatatttccagagtgtctgccgcttcccatatgccttttatcggttctgtcggaccgaaattcttccttaaaaattcgatggaagaagtcgccgcgattaaagatatcggcaactactttgaccgcgcagaatatattaaatggaagtcgttccgcgatacggatgacagccgctatgtgggattagtgatgccgcgcgtgctgggccgtctgccctatgggccggacacggtgccggtacgcagctttaactatgtggaagaagtcaaaggcccggatcacgaaaaatacctgtggacaaacgcctcgttcgcctttgccgccaatatggtgaagagctttgtgaataatggctggtgcgtgcagatccgtggcccacaggcgggcggcgcagtggccgatctgccgatccatctttacgatctcggcaccggcaatcaggtcaaaattccgtccgaagtgatgatcccggaaacccgcgagtttgagttcgccaaccttggctttattccactctcttattacaaaaaccgcgattacgcctgctttttctcggcaaactccgcccagaaaccggcgctgtatgataccgctgacgccaccgccaacagccgtatcaacgcccgtttgccctatatcttcctgctgtcccgcattgctcactacctgaaaattattcagcgcgagaatatcggcaccaccaaagaccgccgcgtgctggaactggagcttaacacctggatccgcacgctggtgacggaaatgaccgatccgggcgatgaacttcaggcttcgcatccactgcgcgacgggaaagttatcgtcgaggacatagaggacaatccgggctttttccgcgtcagactctttgccgtgccgcatttccagatcgaagggatggacgtcaacctttctctggtttcccagatgccaaaagcaaaagcc

SEQ ID NO: 778 - protein, 514 aa, Escherichia coli
MLMSVQQEHATSETATLTTTESGGVYQSLFDKINLTPVSSIQEIDLWQNSETLADASPDERVTAAIHVLLSCLAKSGEDVVKLDKSLLDFHIDDLDQKISKQLDAVMHHPEFQKVESLWRGTWFVVQRTDFRKNVRIELLDISKEHLRQDFDDSPEIIQSGLYRHTYIQEYDTPGGEPVASLISSYEFDNSPQDIALLRNISRVSAASHMPFIGSVGPKFFLKNSMEEVAAIKDIGNYFDRAEYIKWKSFRDTDDSRYVGLVMPRVLGRLPYGPDTVPVRSFNYVEEVKGPDHEKYLWTNASFAFAANMVKSFVNNGWCVQIRGPQAGGAVADLPIHLYDLGTGNQVKIPSEVMIPETREFEFANLGFIPLSYYKNRDYACFFSANSAQKPALYDTADATANSRINARLPYIFLLSRIAHYLKIIQRENIGTTKDRRVLELELNTWIRTLVTEMTDPGDELQASHPLRDGKVIVEDIEDNPGFFRVRLFAVPHFQIEGMDVNLSLVSQMPKAKA

SEQ ID NO: 779 - DNA, 1335 bp, Escherichia coli
atgaaaatttgtcgaccactgtgggctgaggggacattcctgtcttctcagcagtttcagcagcaggcccgctgggaagcgttcagcaatgacagcattgcgcagctttgtattcgccatccgtgggggatcgcaaacgtgctctttgaccgggatgccctggcgctcggaaagctgaaaacgcaggcagtacgcctgcgttttgctgatggtacgctgatcgattcagacgtgagtgacgttctgccgctcgcctgcgatctgcgcgcgctgaagaacgacagcgcgattgtcctgctggcgctgccgcttgcacatggtaacggcggtaatctcggtcagggtgagcagactgaaagaccgctgcgctatcgtcaggaatggcaaaaggtgcaggatatctacggcagtgacagtgaagatatggccgttgagcgtcatgcgctgtccctgcgctttgctcatgataacaatcaggattacatcacctgcccactggcgcgtctggtgcgggatgttcagggcaactggacacaggatgagagctatattccgccgttactggcgtttaacgcccatgacgggctggtacagcgtctggacacgctgctgttgcagctacgggccaaatgtcagcgcctgatggcgatgcgccgggaaagcaaccagcgtatggcggacttcgccgtcgccgatgtctccctgttctggctgcttaacgcgctgaactccgccgagccggtactgagtgatttcctgcgctacccggcggttcatcccgaactggtctggcgggagctggcgaggcttgccggtgcgctgctgacgttttcccttgaacataacgtcagcgccgttccgccctatgtccacgaatcgccgtccatcgtctttccgccacttttctccctgctcagcgaactgctggaagccagcctgccgtcacgggtgatcgcgctggatctggcgtccctgccgggcaaccgctggaaagcagacctgcacgatccgcgcctgcgggaagaggccgacttttacctgtccgttcgttcctctctgcctgcgcatcaggtactgcaccagctaccgctggtctgcaaaatcggtgcgcctgatgacgtcacgctgcttatcaatgtggcgctgaatggtgttccactggtgccgcttacctcagttccggcagcgctgccactgcggctggagaaccagtattttgcgctggatatgcacagtgacgcggctaaatcgatgctggagtccgggtgctgcatgatttatgcgccgggaacaatgggcgacctgaaacctgaactgtttgcggtgctgcgcaca

SEQ ID NO: 780 - protein, 445 aa, Escherichia coli
MKICRPLWAEGTFLSSQQFQQQARWEAFSNDSIAQLCIRHPWGIANVLFDRDALALGKLKTQAVRLRFADGTLIDSDVSDVLPLACDLRALKNDSAIVLLALPLAHGNGGNLGQGEQTERPLRYRQEWQKVQDIYGSDSEDMAVERHALSLRFAHDNNQDYITCPLARLVRDVQGNWTQDESYIPPLLAFNAHDGLVQRLDTLLLQLRAKCQRLMAMRRESNQRMADFAVADVSLFWLLNALNSAEPVLSDFLRYPAVHPELVWRELARLAGALLTFSLEHNVSAVPPYVHESPSIVFPPLFSLLSELLEASLPSRVIALDLASLPGNRWKADLHDPRLREEADFYLSVRSSLPAHQVLHQLPLVCKIGAPDDVTLLINVALNGVPLVPLTSVPAALPLRLENQYFALDMHSDAAKSMLESGCCMIYAPGTMGDLKPELFAVLRT

SEQ ID NO: 781 - DNA, 663 bp, Escherichia coli
atgaaaaaagagacggatatcaatatcgacgcgctgctgcgcgacacgtttctgacggtggtggaactgcgtcagggaaccaccgtgcgtcacggtatggagctgtatcgccactgccagcggcaggtggaactggtccgcgaacgtctgaaagatgccggattcagtcgggagaacgtggagcacataacttacgcgcagtgcgccctgctggacgaaacggtcctgagccgtagcggcatggacgacggtcagaccatttggatgaaggatccactccagtcgcatttcttcaacaccctgcaggccggtgagctgctgtacgagcggatgaagcaggtgctacaggaacccgcccccgcgcaggccgtgctgacctgctttcaccgtgtcctgctgctgggatttcgcgggcgttatcaggatccggcagccccggagcgcgaccagcttatttcgacgctcaacgggcaggtcgcgccatttggtgtgctgccggaaacggcggtactgaacgtgccgttatccacccgtcagcaccctttgctgcattcgccatttttctggctggtaacactggcgctgctactggcgggcgtctggtgggggctacaccactggctgaatgtactggtggatgaactgctgccgcaaagcctgcgt

SEQ ID NO: 782 - protein, 221 aa, Escherichia coli
MKKETDINIDALLRDTFLTVVELRQGTTVRHGMELYRHCQRQVELVRERLKDAGFSRENVEHITYAQCALLDETVLSRSGMDDGQTIWMKDPLQSHFFNTLQAGELLYERMKQVLQEPAPAQAVLTCFHRVLLLGFRGRYQDPAAPERDQLISTLNGQVAPFGVLPETAVLNVPLSTRQHPLLHSPFFWLVTLALLLAGVWWGLHHWLNVLVDELLPQSLR

SEQ ID NO: 783 - DNA, 1650 bp, Escherichia coli
gtgaggaacacgctgaaacaggccatcgtgctgtggggaatggtgttactgctggtgctgtggtcagtgtttatcagtccgtctggcgtgctgagatgggccggtgcggcggctatcgttctggcggttgccgcgttgttgatttatcggcgcaggcaggcgtggacggagatgaccggcgatgccgggttgtcatcgctgccgccggaaacctaccgacagccggtagtgctggtctgtggcggtctgtcggcgcacctgtccactgacagcccggtccgccaggtttcagaagggctgtatctgcatgttcctgatgaagaacagcttgtggcgcaggtggagcgattgctgacccttcgcccggcgtgggcatcgcagcttgccgtggcgtataccatcatgcccggcatacaccgggatgtggcggttctggccggacggctgcgacggttcgcccacagtatggcgacggtgcgtcgtcgggcaggcgtaaacgtcccctggcttctctggagcgggctgtccggctcgccgttgccggaaagagcgagttcaccgtggtttatctgtaccggcggcgaagttcaggtagcaacatccacagagaccaccatgcccgcgcagtggattgcacaatccggcgtacaggagcgcagtcagcgactctgttacctgctgaaagctgaaagcctgatgcagtggctgaatcttaatgtgctgacggcactgaacggcccggaggcgaaatgtccaccactggcgatgaccgtggggctggtcccctcgttgcctgcggtggataacaacctgtggcagttgtggatcaccgccagaaccggcctgacgccggatatcgcggacaccggcacagacgatgcgctgccattcccggatgccctgttacggcagttgccgcgtcagtcgggctttaccccgctgcgacgagcctgcgtgaccatgctgggcgtcaccaccgtggcgggtatcgccgcgctgtgcctgtcagccacggcaaatcgccagttattacggcaggtcggtgacgatctgcaccggttttatgccgtcccggtggaggaatttatcaccaaagcccgtcacctgtcggtgctgaaagacgatgcgaccatgctcgatgggtattaccgggaaggagaacccctgcgcctcggtctggggttataccccggcgaacgcatccgccagccggtattacgcgccattcgcgactggcgtccgcctgaacaaaaaatggaggtgacggcttcgcttcaggttcagaccgtgcgtcttgacagtatgtcgctgtttgacgtcggacaggcccgcctgaaagacggctcgacaaaagtgctggtggacgcactggtgaacatccgggcaaaaccgggctggctgatcctcgtggccggatataccgatgccaccggcgatgaaaaaagcaatcagcagttatcgctgcggcgtgccgaagcggtgcgcaactggatgctgcagaccagcgacatcccggccacctgttttgccgtacagggactgggcgagagccagcctgcggcgaccaacgacacgccacagggccgggcagtcaaccggcgtgtcgaaatcagtcttgttccgcgttctgacgcctgtcaggacgtgaaa

SEQ ID NO: 784 - protein, 550 aa, Escherichia coli
VRNTLKQAIVLWGMVLLLVLWSVFISPSGVLRWAGAAAIVLAVAALLIYRRRQAWTEMTGDAGLSSLPPETYRQPVVLVCGGLSAHLSTDSPVRQVSEGLYLHVPDEEQLVAQVERLLTLRPAWASQLAVAYTIMPGIHRDVAVLAGRLRRFAHSMATVRRRAGVNVPWLLWSGLSGSPLPERASSPWFICTGGEVQVATSTETTMPAQWIAQSGVQERSQRLCYLLKAESLMQWLNLNVLTALNGPEAKCPPLAMTVGLVPSLPAVDNNLWQLWITARTGLTPDIADTGTDDALPFPDALLRQLPRQSGFTPLRRACVTMLGVTTVAGIAALCLSATANRQLLRQVGDDLHRFYAVPVEEFITKARHLSVLKDDATMLDGYYREGEPLRLGLGLYPGERIRQPVLRAIRDWRPPEQKMEVTASLQVQTVRLDSMSLFDVGQARLKDGSTKVLVDALVNIRAKPGWLILVAGYTDATGDEKSNQQLSLRRAEAVRNWMLQTSDIPATCFAVQGLGESQPAATNDTPQGRAVNRRVEISLVPRSDACQDVK

SEQ ID NO: 785 - DNA, 489 bp, Escherichia coli
atggctattcctgcttatctctggctgaaagatgacggcggcgcggatatcaaaggttccgtggacgttcaggggcgcgaaggtagcatcgaagtggtggcgctggatcacgatgtgtacatcccgaccgacaataacaccggcaaactgaccggtacccgtactcacaagccttttacgtttaccaaagaaatcgatgcgtccagcccgtatctctacaaagctgtgaccaccggacagaccctgaaaacggcagaatttaagttttaccgcatcaacgatgccggtcaggaagtggagtacttcaacatcacgcttgataacgtcaagctggtcagagtcgctccgcttatgcacgacatcaaggatccttccagagagaagcataaccacctggaacgtattgagttccgctacgagaaaatcacctggacttacaaagacggcaacatcattcattccgactcgtggaatgagcgtccttccgcc

SEQ ID NO: 786 - protein, 163 aa, Escherichia coli
MAIPAYLWLKDDGGADIKGSVDVQGREGSIEVVALDHDVYIPTDNNTGKLTGTRTHKPFTFTKEIDASSPYLYKAVTTGQTLKTAEFKFYRINDAGQEVEYFNITLDNVKLVRVAPLMHDIKDPSREKHNHLERIEFRYEKITWTYKDGNIIHSDSWNERPSA

SEQ ID NO: 787 - DNA, 2574 bp, Escherichia coli
ctggacgctgccgcctcactgtgtcagacccgcgcccatgcggaaataaccattgaacactggctgctgaaactgctggagcagggagaaggcgatatcacggtgattgcccgccgctatgaatgggatatcgacacgctctggcagtctctgctggcacatctggacaccttaccccgcccggtccgcgaacgtcctcaactttctgaaccgctggcagcgcttatccgacaggcgtggctgatagcgtcactggaaggcgacgatccacaaatccgcagccagcatctgctgatggcgctgacagaaaaaccgatgctgcccgcctgtaatgacctgtgggtattgctgagtctgagccgcgtgcagcttgagcggctgcgtcccctgctggatgcgcagtcggatgaatgtccggcacgtcagccacaggtcaccgaaccgctgacctctgcactgccggagacggcaacggcggacgcaccggcaaaaacgctgacggagaaacaggatgacgccctgctggcggtgcttaaccgctttaccgaagacgtgacggaaaaagcccgcagcgggcgaatcgacccggtattcgggcgcgacacggaaattcgccagatggtcgatatcctctcccgtcgccgcaaaaacaacccgattctggtgggagaaccgggggtgggcaaaaccgcgctggtggaagggctggcgctgcgtatcaccgaaggcaacgtgccggacagcctgaaaacggtgcatatccgcacactggacctcggtctgttacaggctggcgcgggcgttaaaggtgaatttgaacagcggctgaaaaatgtcatcgatgcagtgcagaaatcaccggagccggtactgctgtttattgatgaagcccataccattatcggtgcgggtaatcaggcaggcggcgcggatgcggcgaacctgctgaaaccggcactggcaaggggcgaactgcgcaccatcgcggcgaccacgtggagcgaatacaaacagtattttgagcgcgacgccgcgctggagcgccgcttccagatggttaaggttgacgagccggatgatgacaccgcctgcctgatgctcagggggctgaaagcccgctatgcgcagcaccacggcgtacatatgctggacagcgccattcagaccgccgtgcgcctgtcgcgccgctatctgaccggacgccagttgccggacaaggcggttgatttgctggataccgccggggcaagagtccgcatgagccttgacaccctgccggaaccgttgacgcagcttcatgtgcgactggcggcactggatattgagcgggaagcgattgagcaggacagcgtattttatcccgaagccagcccggagcggctggcggaactgaccgatttgcgtgatgagctacaggcagaagccgggcatctggaagcgcagtatcagcaggaaaaggcactggcgcagcagattatgacgttgcgtcaggaagggacagacagcactgaactgcaacagcaactgcgaacgcatcagggctttgcaccgctgctggcgctggatgtggacgcccgcgccgtcgccacggtggtggcggactggaccggcatcccgctatcttccctgctcaaggacgagcagagcgacctgctcagtatggaacagagtcttgaaaaccgcgttgtcgggcaaagcccggcgctctgcgccatcgcacagcggctgcgggcggctaagaccggcctcacgccggagaacggcccgcagggggtattcctgctgaccggccccagcggcaccggtaaaaccgaaactgcgctcacactggccgacactctgtttggcggtgaaaaatcccttatcaccatcaacctctccgaatatcaggagccgcataccgtctcccagcttaaggggtctcctccgggctacgttggctacggtcagggtggcgtactcaccgaagccgttcgcaaacgcccttacagcgtggtgctgctcgacgaagtggaaaaggcgcaccgcgacgtaatgaacctgttctatcaggtatttgaccggggctttatgcgcgacggcgaaggccgggaaattgacttccgcaacaccgtgattctgatgacggctaatctgggcagcgaccacatcatgcaactgctggaggaaaaaccggacgccacggacgcagacctgcatgaactgctgtatcccctgctgcgcgagcacttccagccagcactgatggcgcgttttcagacggtgatttaccgcccgctgggacaggaggcgatgcgcgccattgtggaaatgaaactggcgcaggtggcccgccgtcttcaccagcactatgggctggaaacggaaatcagtaacagcctgtacgacgccctgaccgccgcctgcctgctgccggacaccggtgcgcgtaatatcgacagcctgctgaaccagcaaatcctgccggtcttaagccagcagttgctggcgcagcaggccgtgcatcataagcctgcccgactgcggcttgactgggatgatgaagacgggattgtgctggaatttgatgagaaa

SEQ ID NO: 788 - protein, 858 aa, Escherichia coli
LDAAASLCQTRAHAEITIEHWLLKLLEQGEGDITVIARRYEWDIDTLWQSLLAHLDTLPRPVRERPQLSEPLAALIRQAWLIASLEGDDPQIRSQHLLMALTEKPMLPACNDLWVLLSLSRVQLERLRPLLDAQSDECPARQPQVTEPLTSALPETATADAPAKTLTEKQDDALLAVLNRFTEDVTEKARSGRIDPVFGRDTEIRQMVDILSRRRKNNPILVGEPGVGKTALVEGLALRITEGNVPDSLKTVHIRTLDLGLLQAGAGVKGEFEQRLKNVIDAVQKSPEPVLLFIDEAHTIIGAGNQAGGADAANLLKPALARGELRTIAATTWSEYKQYFERDAALERRFQMVKVDEPDDDTACLMLRGLKARYAQHHGVHMLDSAIQTAVRLSRRYLTGRQLPDKAVDLLDTAGARVRMSLDTLPEPLTQLHVRLAALDIEREAIEQDSVFYPEASPERLAELTDLRDELQAEAGHLEAQYQQEKALAQQIMTLRQEGTDSTELQQQLRTHQGFAPLLALDVDARAVATVVADWTGIPLSSLLKDEQSDLLSMEQSLENRVVGQSPALCAIAQRLRAAKTGLTPENGPQGVFLLTGPSGTGKTETALTLADTLFGGEKSLITINLSEYQEPHTVSQLKGSPPGYVGYGQGGVLTEAVRKRPYSVVLLDEVEKAHRDVMNLFYQVFDRGFMRDGEGREIDFRNTVILMTANLGSDHIMQLLEEKPDATDADLHELLYPLLREHFQPALMARFQTVIYRPLGQEAMRAIVEMKLAQVARRLHQHYGLETEISNSLYDALTAACLLPDTGARNIDSLLNQQILPVLSQQLLAQQAVHHKPARLRLDWDDEDGIVLEFDEK

SEQ ID NO: 789 - DNA, 2472 bp, Escherichia coli
atggaggctcttatgaacgtacagttcttcgaccacgcacaccacaagctcaaaattcgcggcctgcaaagtccggtggatgtgctgacctttgaaggccgcgagcaactgagtaccccgttccgctacgacattcagtttaccagcagcgataaagccatcgcgccggagtcggtgctgatgcaggatggcgcattcagcctgacggcaccgccggtacagggaatgccggtacagactgccctgcgcaccctgcacggcgtcattaccggctttaaacatctctcatcgtcacaggacgaagcccgttacgaagtgcgccttgaaccccgtatggcgctgcttacccgcagccgccagaacgccatctaccagaaccagacggtgccgcaaatcgtcgaaaaaatcctgcgcgagcggcaccagatgcgcggtcaggacttcgtgtttaacctcaaaagcgaatacccggcccgcgaacaggtgatgcagtacggtgaggacgacctgacgtttgtttcacgcctgctgtcagaggtgggtatctggttccgctttgccaccgacgcccggttgaaaatcgaagttatcgaattttacgacgaccagagcggctacgagcgcgggctgacgctgccgcttcgccatccttctgggctgtttgatggtgaaacggaagccgtatgggggctgaacaccgcgtacagcgtggtggaaaaaagtgtctccacgcgggactacaactaccgtgaagccacggcggaaatgaccacaggccagcatgacgccaccgggggcgataacaccacttacggcgaagcctaccactatgccgacaacttcctgcaacaaggcgataaagaggcagcggaaagcggcgcgttttatgcccgtatccgtcacgaacgctacctgaatgaacaggccattctcaaaggccagagcaccagttcactgctgatgccggggctggagataaaagttcagggcgacgacgcgcctgcggtgttccgcaagggcgtgctgattaccggcgtgacgaccagcgcggcgcgtgaccgcagctatgagctgacgttcacggcgataccgtactcagaacgctacggctaccgtccggcgctaatcccccgcccggtcatggccggaacgctcccggcgcgggtcaccagcacggtgaagaacgatatctatgcccatatcgacaaggacgggcgctaccgagtcaaccttgactttgaccgcgatacgtggaaaccgggttatgaaagcctgtgggtacgccagtcgcgcccgtatgcgggagacacctacggcctgcacctgccgctgctggcgggaacggaggtcagcatcgcctttgaggaaggcaacccggacaggccgtatatcgccggggtaaaacacgactcggcgcacaccgaccatgtgaccattcagaactacaagcgcaacgtgctgcgtaccccggccaacaacaaaatccggctggatgacgagcgcgggaaggagcatatcaaggtcagtaccgaatatggcggcaagagccagctaaacctcggccatcttgttgatgccgggaaagaacagcgtggcgaaggctttgaactgcgtaccgatctgtggggcgcggtgcgggcgaagaaagggatttttatcagcgctgatgcgcaggataaggcgcagggtcaggtgctggagatgcagccagctctggctcgcctttctgcagcgttggtgacaatggaatctctggctgccagtgcgcaacaggctcaggcactggcggcagatgtgagtcgtcagcagacgctgttgcagcaaaaaattgagcagttacagcaggaagtgctactgggtagcgcacctaagggcgtggcgcttgtcagcggtgaggatatgcagttgtctgccagcgataatctgactctgacagcaggtaagcaactggatattggcgtacagaaagactttacgctggcagcaggaaaacagctcagcttgtatagccgtgcgggagcaaagctctttagctcacataacgatattgatattcaggcgcaggggggaaatctgaccacctggtcaacacaggacacctatatatcgagtggtaaaaagctggtggtgacagcgcaggatgagttaacactgatttgtggcgggggctatatcaaaattaaaagtggcaatgtggagattggcggtccgggaaaactattggttaaaaatgccggtattaagaaagcaggctccggtagtatgcagggcgtgatgaagtcgtttgagcctgaaagtttcgatgaaaatttcattatttcgaatccagcatcaggtaagccgatagcaaatcaaaaatatgaaatacacatgccagatgggagtgttattgccgggataaccgatgcaatggggtattcctctcttgttgcgtcaaaagcatctgatgacctaaaaattattctgaaaaaa

SEQ ID NO: 790 - protein, 824 aa, Escherichia coli
MEALMNVQFFDHAHHKLKIRGLQSPVDVLTFEGREQLSTPFRYDIQFTSSDKAIAPESVLMQDGAFSLTAPPVQGMPVQTALRTLHGVITGFKHLSSSQDEARYEVRLEPRMALLTRSRQNAIYQNQTVPQIVEKILRERHQMRGQDFVFNLKSEYPAREQVMQYGEDDLTFVSRLLSEVGIWFRFATDARLKIEVIEFYDDQSGYERGLTLPLRHPSGLFDGETEAVWGLNTAYSVVEKSVSTRDYNYREATAEMTTGQHDATGGDNTTYGEAYHYADNFLQQGDKEAAESGAFYARIRHERYLNEQAILKGQSTSSLLMPGLEIKVQGDDAPAVFRKGVLITGVTTSAARDRSYELTFTAIPYSERYGYRPALIPRPVMAGTLPARVTSTVKNDIYAHIDKDGRYRVNLDFDRDTWKPGYESLWVRQSRPYAGDTYGLHLPLLAGTEVSIAFEEGNPDRPYIAGVKHDSAHTDHVTIQNYKRNVLRTPANNKIRLDDERGKEHIKVSTEYGGKSQLNLGHLVDAGKEQRGEGFELRTDLWGAVRAKKGIFISADAQDKAQGQVLEMQPALARLSAALVTMESLAASAQQAQALAADVSRQQTLLQQKIEQLQQEVLLGSAPKGVALVSGEDMQLSASDNLTLTAGKQLDIGVQKDFTLAAGKQLSLYSRAGAKLFSSHNDIDIQAQGGNLTTWSTQDTYISSGKKLVVTAQDELTLICGGGYIKIKSGNVEIGGPGKLLVKNAGIKKAGSGSMQGVMKSFEPESFDENFIISNPASGKPIANQKYEIHMPDGSVIAGITDAMGYSSLVASKASDDLKIILKK

SEQ ID NO: 791 - DNA, 840 bp, Escherichia coli
atgatttcagggggaaatatgttgaaagaatggatgatatttacgtgcagtttattgactctggctggggcgtcactgcccctcagtggctgtatttccagaggccaggagtctatatccgaaggggcggcatttggggcagggatcctgcgcgaaccgggagcaacaaaaaaagccgacacgaaagacctcaatgtgccaccaccggtttatggtccgccgcaggtgatatttcgcattgatgacaaccgctatttcacgctagaaaattatacccactgcgagaacgggcagacgttttataataataaagcaaaaaacattcatgttaaaatattagacgcttcagggtatttatttaaaggccgcttattctggttatcaacgcgtgatgattttctggcctttcctgccacgttaaataccagacacgcttcctgtatggggtcgaataaaggctgtatgaatgcggtcattgtcactaccgatggtggaaaaagacgcagtggtgtgccatacggcagttatacccagaatccgaccggtgccacgagggattatgacatgctggtgatgaatgacggcttctacctgcttagatatcgggggggacagggcagatttagtccggtgatacttagatggattctcagtactgaagatagctctggtgttgtgcgttcagaagatgcttatgaattgttccgtcccggagaagaggtaccctccaccggtttttataaaatcgacctgtcacgtttttatcccaaaaacaacgttatggaaatgcagtgtgacaggacgctggagccagttcaaccttcagagagtaaaattcaa

SEQ ID NO: 792 - protein, 280 aa, Escherichia coli
MISGGNMLKEWMIFTCSLLTLAGASLPLSGCISRGQESISEGAAFGAGILREPGATKKADTKDLNVPPPVYGPPQVIFRIDDNRYFTLENYTHCENGQTFYNNKAKNIHVKILDASGYLFKGRLFWLSTRDDFLAFPATLNTRHASCMGSNKGCMNAVIVTTDGGKRRSGVPYGSYTQNPTGATRDYDMLVMNDGFYLLRYRGGQGRFSPVILRWILSTEDSSGVVRSEDAYELFRPGEEVPSTGFYKIDLSRFYPKNNVMEMQCDRTLEPVQPSESKIQ

SEQ ID NO: 793 - DNA, 1992 bp, Escherichia coli
atgagtaccaataaatcagagccaacccgaaaggtcgatgttcatcttacggataatggtactccttttgcctattcaatgacctctcataaaaatgtcaaagtccgtgcggaagttcaaccaccgctccagttacccggcttaattatttttgttcacggcgttaattctgaaggcgaatggtacgattatgctgagaggtcgttatgcgccggactcaatcagcgcctggggcttgaaggtgagcatggtcttaaggaaaacaactatgaaggaggtttctttgtcaacagcgataaaagtgagggtggttgggaacatacctacgaaatagagggttcccaaaagaaatgggtttcaggccccagaaaaataacaaaaggtggtgacggtcgttccccggttattcgtttttactggggctatcgtgcggcggataatgaaaccgatacatacgccattccgctaaaaaataaaaagggggacaactattatgaccttcccccggaatcgcgtaaagccaaaggcccttggttttggggcggcggtccgttccagaatggctgcaaccaactggtcagcctgtggagtaaaaccgggtttaataacaatccatccctgctgggggttccgcttccgttcagtactcaggtactgaacggcgaacgtgacaggctactaagcgacgccccaccaagacactattacgctcatgcggctggtcgtctggccaaattaattaaaaccattcgcaaccagcatccggaagacaccgttacggtgctgtcacacagtcaaggaacaatgattgcgctggcggcggcagccatcgaagcgccggatgcgctgtttgtgatgaactccccctatgcgctggagaatgaacctaccacctatatttcctacccgataaaggaaattatcagccgtaaggccagatcggcgacgtttgcccgatattgtcaaaaaggtagcggaaaacaaaacgcggctgaagcaacagggctgcgacaatctcagggctgcgacaatctgctggcaggcatgagcagcgacggtaattcatggatcccggaaggtaaaacacataacggactaccggagcgggacaaccatggaacgacgtggatttattgtaatccccatgaccgagttatggggtcttcccccctgcgcagtattggctggcaggggctgccggatactaaagatggcacaccacataccttatttaaacaggctggagatacgctttatgttcgtatacttgggcgcaatacaccctgcggcggtacgccgaccgcacagacccatttcagtaatttgggtgatggcaaacccttctgggacagcacaacaacgctgttacagagggcaacgtggccggatccggacagcgggcagacattaactattaacgcgccgcaggtgccggaaccgctgacagctgaagaactaaagaattttgatcaagactatgcccgtgacgaaaagcaaagcggcggagcaggatatgcttacgggcagattaacccagagacgaaaaaacctgtcgataccgactatcgttattacatttcactgtatggctattttgaccggaagatggtgccgaaaaaagactcgggatactaccagtcagggccggggtcgaaagaggacagggtaaagtatgaaaagcagtcacaagaagagatgctggaggaggtaagaacctatgttcagcgtccaacagatcacagtaccctgccatcggatgagcgatttatgagccgggtggtggcctatgatttacccatcggttactgctggcattcgtgggacaaagcgggtctggaagagcttcgtcgtcaggctgactggctggaaagcgatgactattactttagtggcaagctgactgttccgccaataccgcctgcgataaaacaggatgtcgccgaagatgctgaacagagaaaggcagaagaaaaggcccggttacgtaatgtg

SEQ ID NO: 794 - protein, 664 aa, Escherichia coli
MSTNKSEPTRKVDVHLTDNGTPFAYSMTSHKNVKVRAEVQPPLQLPGLIIFVHGVNSEGEWYDYAERSLCAGLNQRLGLEGEHGLKENNYEGGFFVNSDKSEGGWEHTYEIEGSQKKWVSGPRKITKGGDGRSPVIRFYWGYRAADNETDTYAIPLKNKKGDNYYDLPPESRKAKGPWFWGGGPFQNGCNQLVSLWSKTGFNNNPSLLGVPLPFSTQVLNGERDRLLSDAPPRHYYAHAAGRLAKLIKTIRNQHPEDTVTVLSHSQGTMIALAAAAIEAPDALFVMNSPYALENEPTTYISYPIKEIISRKARSATFARYCQKGSGKQNAAEATGLRQSQGCDNLLAGMSSDGNSWIPEGKTHNGLPERDNHGTTWIYCNPHDRVMGSSPLRSIGWQGLPDTKDGTPHTLFKQAGDTLYVRILGRNTPCGGTPTAQTHFSNLGDGKPFWDSTTTLLQRATWPDPDSGQTLTINAPQVPEPLTAEELKNFDQDYARDEKQSGGAGYAYGQINPETKKPVDTDYRYYISLYGYFDRKMVPKKDSGYYQSGPGSKEDRVKYEKQSQEEMLEEVRTYVQRPTDHSTLPSDERFMSRVVAYDLPIGYCWHSWDKAGLEELRRQADWLESDDYYFSGKLTVPPIPPAIKQDVAEDAEQRKAEEKARLRNV

SEQ ID NO: 795 - DNA, 1701 bp, Escherichia coli
atggaaagtgatatgggaaaaaatgtggtagtactcaatgacgcaacttctcacggtggcaaagtctcttcggcctcttcaacctttgatattcagggaaaaaaggctgcactgctgaatgataccgtcacttgcccgaagcatggtactaacccaattgtggagtgtgataccagttatgaggagggtggacgtgggattgttgtgcatggctgtaagcgcctgcggctcggtggtgtatgccagtctgccggatgtggagataggctgatggggtggtcaaaaccgaaaattcccaccagcaaagacgtgcagcgctggtctccttgggtatgcctttttattctgtttgccggggcatttgtcgcgctcacatatgggatactgcattcccctgcggacggactccccgccctcgccagcggttactggttgcccttgacaggcaggatgatggctggagtgatgacagccctaaccggctatttgttgtggtgggagtttcaggcatattacgtctggtgctggaatagtcggcggcacagcgcactccttgtctggcagcagcgagcacatcagcaccgctacttagcctgccatgttctgctgacctcagacacgcaactgcttcctcgcctcgcaggtacttcttatgaagataataataatgatcctcctttaacattattggcagaggagccgctgatacccggtattgcgcgttttgagcaactttgccagttactgataaaccagattaaagcttctcttattcagcattatccttccggtcagatgactgtactgattgaaacctctgcatcggataaagagcgtgagcgaacaacccttattcgtttatggaaagaggatgaattaccctggatactggacatccatatgtcacccactccccttcctctcagtgatgagaataaccacttatttgatattgataaccctgttcttgttttggcgttgcactaccgccagccggaggaaaacctgccggaattcgccagcgcattgttactgttgccgcccgagttactgaaagtttctatacggcgggatacggtgcgggtgtttcgcccgatgccactaaacattgatgcgatctcccgtgagttgactgaactgcgggatatggcgcaacagccagtgaatgccagatatctggtctggcacagtggtctgacacaggcatcacaacaggctctgggccgtgtggtgaacgaccttccgttatccctgcataacgatatcgccactggcggaattattgatgtggataaagttatcgccgcttacgggcctcctgccggttggctgatggtggcaaccgccgcagagatggtcagatacgggccgggaagtcactggttgttacaggtcagaaataaacaggccagtgctgtggtgacgggcaacggctatccggcgattaatcaggaataccttgatacaacctcatctccttatcccgcaggttccctaatgctggcggttatgctcaatatactggtgctctggtttatcgggcggtacagccaggaatggctgttttcctgggcaggcgtagccatgacactgttgctgatgatagtgacattgccaggcatcgtctttggtttacgaagcgctgttgctcatctgcaataccctcgctttatacaggctatcgttcgcgcccagaaggaa

SEQ ID NO: 796 - protein, 567 aa, Escherichia coli
MESDMGKNVVVLNDATSHGGKVSSASSTFDIQGKKAALLNDTVTCPKHGTNPIVECDTSYEEGGRGIVVHGCKRLRLGGVCQSAGCGDRLMGWSKPKIPTSKDVQRWSPWVCLFILFAGAFVALTYGILHSPADGLPALASGYWLPLTGRMMAGVMTALTGYLLWWEFQAYYVWCWNSRRHSALLVWQQRAHQHRYLACHVLLTSDTQLLPRLAGTSYEDNNNDPPLTLLAEEPLIPGIARFEQLCQLLINQIKASLIQHYPSGQMTVLIETSASDKERERTTLIRLWKEDELPWILDIHMSPTPLPLSDENNHLFDIDNPVLVLALHYRQPEENLPEFASALLLLPPELLKVSIRRDTVRVFRPMPLNIDAISRELTELRDMAQQPVNARYLVWHSGLTQASQQALGRVVNDLPLSLHNDIATGGIIDVDKVIAAYGPPAGWLMVATAAEMVRYGPGSHWLLQVRNKQASAVVTGNGYPAINQEYLDTTSSPYPAGSLMLAVMLNILVLWFIGRYSQEWLFSWAGVAMTLLLMIVTLPGIVFGLRSAVAHLQYPRFIQAIVRAQKE

SEQ ID NO: 797 - DNA, 3327 bp, Escherichia coli
atgaaaagagttgtgcgtcttttgggtgtggggttactgctccttgttgtgttgttgctcattttgtttgttctggctcagaccacaccgctgatatcagcacaggatgagcatgctgtctggcttcgtctgttgataacagcgattgtgatctgtttgctaagtatgtgcatatttttcctcttttctttccggcagaacgaagcctcgacgatatcactatacgctcaaccgactgatataaaggaaataaatacggagcagccgaactatgcatcactgctgacgatatatttacgcgaccgctacggtccgttctggcggcgtaaagtccgcctgctgctggtgaccggcgagcctgaacaggcagaagccatcgcgccggggctgaccgggcaacactggctggaaggcgaccacacggtgctgatatatggcggcaggccaacagcggagcctgatgtcacactgctgaccgccttaaaaaaactgcgccgcagccgtccgctggacggcatcatctgggcgctgacagaagaacagagccgccagacagcgcaactcgacaaaggctggcgcggactgataaacggcggtaagcgactcggttttcaggctccactctatttgtggcaggtctgtgacgacggtgattatcagaccggacgccccctgcaaagcgtcggctgcctgctgccggaacgctgtaccccggaacaactggctgtaatgctggaagcagccgctgacggaacagggcatgtcgcagctactgaccgataccgcatgttttctgctgcgtctggctcatacccttgcagagcggggtattgctcactggcagaccgtcctgaaaccgctgctggcaggcggcgcattttcttccctgcgcctgcgcggcctgatgttcagcccgccgcttgccgccgtgccggaggccagcacctcatgcagtggctgccgtcaccggtctgggcgggcgtgacggtgataacgcgcgcgggcgcacggtgggttttcctgtggctgcgtaccgcactgatgtccgctgtctgcgtgctggtgatatggggggccggaatgacgacctcgttcttcgccaaccgcgctcttgttcaggaaaccggtatccagacggcacgtgcgcttgatacccgcctgccgctggcagaacaactggtggcgctgcataccctgcagggcgaactggaacgcctgcaatatcgtatccgcgaaggtgcgccgtggtatcagcgttttggccttgaacgtaaccaacaactgctcgccgccgcttttcccggctatgcgcaggcggcaaaccggctggtgcgcgacgtggccgttgaccatctgcaacagcaactgaacgcctttgtcgccctgccgcccaacagtcctcagcgtaccgccaccggtgaacaacgctataagcagcttaaggcattgctgatgacttcccgcccggaaaaggccgacgctgcctttttcagtaccacgctgatggcggacggtctgcgctacgagaatatcccggaaggtgtgcggcagagcgtgttgccgtcactgctgaccttctggacggcgaacctgccggaacacccgcagtggaaaacatcgccgccaccggaactgaccggcgcagtgcgtaaaatcctgctgcgccagattggtgtgcgtaatgccgaaaacaccctctaccagaacgtgctgcaacaggtgtcccgcaactacgccgatatgacgctggcggacatgaccggggataccctcaccgaatctcttttcagtacggaacagacggtgccggggatgttcacccgtcaggcgtgggaaggacaggtcagggaagccatcgagcaggtggtgacggcgcggcgcgaggaaatcgactgggtactcagcgaccgccagcaggatacctctgcggatatctcgccggatacgctgcgtaaccgtctcacctcacgctactttaccgactttgccggaagctggctggcgtttctcaacagcattcactggaaaaaggaagactcgctctccggcattctcgaccagctgacactgatggccgatgcccgtcagtcgccactgattgcgctgacggacaccctcgcgtggcaggcggcgacaggcagggaaaaccgtggtctgtcagactcgctggcgaaatcggcacaggaactgtttaacggcaaggagaaaacgccgcagcaatcccgtgaaggtgacgacgtgcctgtcgggccgctggataaaaccttcacgccgctgctgcgtttgctgggcgataaggccggaggcggcgacagccagctgagtctacagacctacctcacccgcgtcacccgcgtgcgcctcaaactgcaacaggtgaccaacgcccccgacccgcaggagatgacccaacaactggcgcagacggtcttacagggtaaaaccgttgacctcaccgacacccgcgactacggacggttaatcgccgccagtctgggcgaagaatggagtggcttcggtcaggcgctgttcgttcgcccggtagagcagtcgtggcggcaggtgctgacgcctgcggcggacagcctgaaccgccagtggcagcgggcgattgtcagccactggaatcaggacttcgctggccgctatccgttcaaagcctcacagaacgatgcctccctccccctgctggcgcagtacctgcgcgatgacgggcgcatcaacctgtttatcgccgccaacctttccggcgtgctgaaacgagagggccgctactgggtggctgacgccatgaacacgcaggggctgacggtcaatccggactttatccgcgccctgaaccgcctgcgcgacgtggccgataccgcctttgccagcggcgatgccgggatacattttgaactgcgggcaaaaccggcgcgtgacgtgatgaagacgcatctggtgattgacgggcaggagctggaatatttcaaccagaaagaacgctggcagcgttttaactggccggatgaacagtggcaacccggcgcatcgctaagctggaccagcacacaggcgatggagcgcatactggcggattaccggggaagctggagtcttattcgcctgctggaacaggcgcaggtgacgccggtggacagcagcacctttaaggtggtgtggaaagcgcaggacggcctgccgctgaattacctgctacgggttgaacagggtaaagggccgctggcgctgctggagctgaaaaacttccgcctgccgggacaggtgtttctgaccggaaaaagtatgaaggatgtggaagagtatggggaagacgccgatgag

SEQ ID NO: 798 - protein, 1109 aa, Escherichia coli
MKRVVRLLGVGLLLLVVLLLILFVLAQTTPLISAQDEHAVWLRLLITAIVICLLSMCIFFLFSFRQNEASTISLYAQPTDIKEINTEQPNYASLLTIYLRDRYGPFWRRKVRLLLVTGEPEQAEAIAPGLTGQHWLEGDHTVLIYGGRPTAEPDVTLLTALKKLRRSRPLDGIIWALTEEQSRQTAQLDKGWRGLINGGKRLGFQAPLYLWQVCDDGDYQTGRPLQSVGCLLPERCTPEQLAVMLEAAADGTGHVAATDRYRMFSAASGSYPCRAGYCSLADRPETAAGRRRIFFPAPARPDVQPAACRRAGGQHLMQWLPSPVWAGVTVITRAGARWVFLWLRTALMSAVCVLVIWGAGMTTSFFANRALVQETGIQTARALDTRLPLAEQLVALHTLQGELERLQYRIREGAPWYQRFGLERNQQLLAAAFPGYAQAANRLVRDVAVDHLQQQLNAFVALPPNSPQRTATGEQRYKQLKALLMTSRPEKADAAFFSTTLMADGLRYENIPEGVRQSVLPSLLTFWTANLPEHPQWKTSPPPELTGAVRKILLRQIGVRNAENTLYQNVLQQVSRNYADMTLADMTGDTLTESLFSTEQTVPGMFTRQAWEGQVREAIEQVVTARREEIDWVLSDRQQDTSADISPDTLRNRLTSRYFTDFAGSWLAFLNSIHWKKEDSLSGILDQLTLMADARQSPLIALTDTLAWQAATGRENRGLSDSLAKSAQELFNGKEKTPQQSREGDDVPVGPLDKTFTPLLRLLGDKAGGGDSQLSLQTYLTRVTRVRLKLQQVTNAPDPQEMTQQLAQTVLQGKTVDLTDTRDYGRLIAASLGEEWSGFGQALFVRPVEQSWRQVLTPAADSLNRQWQRAIVSHWNQDFAGRYPFKASQNDASLPLLAQYLRDDGRINLFIAANLSGVLKREGRYWVADAMNTQGLTVNPDFIRALNRLRDVADTAFASGDAGIHFELRAKPARDVMKTHLVIDGQELEYFNQKERWQRFNWPDEQWQPGASLSWTSTQAMERILADYRGSWSLIRLLEQAQVTPVDSSTFKVVWKAQDGLPLNYLLRVEQGKGPLALLELKNFRLPGQVFLTGKSMKDVEEYGEDADE

SEQ ID NO: 799 - DNA, 1590 bp, Escherichia coli
atgagtgaactgttgcaaaagctgacccgtagctgttttgccgaccgggatgcactggatgtggcgcgaacacaggcggcgctgtggcagacatggctgctgccggtgacggcagatacgccggtcggggaagaccccggctaccacgacgattttctgcgtatccgcgacgagatgaacaaactttccggcgcggatacggacctcatctgccagcttgccgaatccctgctgctgacgcaggcaaaagacgtgcgcatcgccacttactacatctgggcgcgactgcaccgcgacggtgagcgcggactggcggaaggactggcgctgctgaccggactggtggaacgcttcggtacgcaactgctgccctcgcgcccggccagccggaaaatggcgctggagtggctggcgggggaaaagatgctcgacagccttgcccgctacccggaagtggcaaaagaggattttgcgaacattgttgccgccctgaatctgctgacggtttccttcgccgcgtggccccagcattccccctccctgatgccgctgattaacgcgctggaatcgcgtctggcacagtcgatgaacgcggtggtgccgcagaacagcagcggcgttccggcaccgtcatccccggtggatgcgccgcaggtacagaccatcacctccggacgtgacctgctcgaccaggcgaaagtgctggcccgttatctgaacgaacagccgcagggctggctttcggcgcaccggctgatgaaaaccctgcgctgggatacggtgcatgaactgccgccggacgtggacggcaaaacccggctggccccgccgcgcaccgagtcacgcaaccagcttaagcggctgtatgcccagcagaactggacggaactgctggagcaggccgacctgatgttcagcaccggcgtcagtcatttctggctggacattcagtggtatctgcatcaggcgctgactaaggcgggcgtaccgtgggacaggtggacagccgttatccgtcaggacctggcgttactgctggaacgcctgccagggctggaaaatctggcatggaacgacggcacaccgttcgccgacgaggtgacgcgcaactggatagcgcagcaggtcatgatgcgggaagacggcgcatggcttgcggggaaagccgctgtaccgacagacgacgccacaaatgacgtactggcgctggagccggaagcactggcgatggcagacagtcagggcgtggaagcggcgctgggctggatacagacccgtccgggcatcaccacggcacgacagttattgcggctgctgatggcacgggtggcggaacagtacggtaaaaacgagatggcgctcctgctgctggaagaactggataccgccgcacagggaataacgctgacgcagtgggagccagaactgctgtttgaagtaaaagcccggcaactgaaactgctgcgcctgcgggcacatcgccacgcggacaaggcggcgcttgcccggaaaatggacgctctgctgggttcgctggtggcaatcgatccggcgcggacagcggtactgtgtgatacgcagcataaggac

SEQ ID NO: 800 - protein, 536 aa, Escherichia coli
  MISC_FEATURE (176)..(176): unknown
  MISC_FEATURE (198)..(198): unknown
  MISC_FEATURE (439)..(439): unknown
MSELLQKLTRSCFADRDALDVARTQAALWQTWLLPVTADTPVGEDPGYHDDFLRIRDEMNKLSGADTDLICQLAESLLLTQAKDVRIATYYIWARLHRDGERGLAEGLALLTGLVERFGTQLLPSRPASRKMALEWLAGEKMLDSLARYPEVAKEDFANIVAALNLLTVSFAAWPXDQHSPSLMPLINALESRLAQSXGMNAVVPQNSSGVPAPSSPVDAPQVQTITSGRDLLDQAKVLARYLNEQPQGWLSAHRLMKTLRWDTVHELPPDVDGKTRLAPPRTESRNQLKRLYAQQNWTELLEQADLMFSTGVSHFWLDIQWYLHQALTKAGVPWDRWTAVIRQDLALLLERLPGLENLAWNDGTPFADEVTRNWIAQQVMMREDGAWLAGKAAVPTDDATNDVLALEPEALAMADSQGVEAALGWIQTRPGITTARQXLLLRLLMARVAEQYGKNEMALLLLEELDTAAQGITLTQWEPELLFEVKARQLKLLRLRAHRHADKAALARKMDALLGSLVAIDPARTAVLCDTQHKD

SEQ ID NO: 801 - DNA, 1659 bp, Escherichia coli
atggacgacctgacccaacgctactatgaagccgaaatgcgctacctgcgtgaagcgggtaaagaatttgcgcaggcttaccccgaccgtgctgcgatgcttaatcttgataaacccggcgcacgcgatccctatgtggagcgcctgttcgagggcttcgcttttttaatgggccgcctgcgcgaaaagctggacgacgatctgccggaactgactgaagggctggtcagcctgctgtggccccactacctgcgaaccatcccgtcactttccgtggttgaactgtcgacagatcaccggcagatgaagcagagcgaaacgctgaaagagtttcaggtgctatcccgtcccatcggcgaacgcagaacccgctgcgtctacagtgccacgcgtgatatcacgctgcatccgctggcgttgccggacgtgtcattgcaatatgaaccggacggacgctcggttatccgtctgcgctttgcgtgcggcccgctggttggtgactggtcgcagatcgatttatcccgcctgccgctctatctcaatgccgacagcccggtagcctgtgcgttgcaccgggctttaacgcttggcacgcagcagttctggctgcgtctgccggggcaggaacgccgtgtgctggacgcgcacttttccccgatgggttttgatgacgatgaccgactgtggccgaaaggtgagtcagcgttcagcggctaccagttgttgctggaatatttcaccttccgtgagaagtttatgtttgtggcgctgaacgggctggagaacgtcatctggccggaaaggataaccggctttgagattgacgtggtgctggcggaaaactggcctcatgatttgccgtttaataccgacaatctccgcctgcactgcgtgccggtcatcaacctgttcccgctcgaagccgatccgttacacctttcgccgctggaaaacgaatttctgctgcgcccgatgcgcattcaggacgggcataccgagatttattccgtcgacaacattatttcttcgcgccataccggcagtcaggcgtatgtccccttctccagctttcgtcaccggggcgggatgctgcgccacgatgcgccggaacgctattaccacacgcgggtaaagcgcggcccttccggcctgcatgacacctggctgattctgggcggcgatgcatttgatactgaccggatgctggaggatgaaacgctctctttaagcctgaccggtactaacgggcagcttccccgtaaggctttacagagcacgctgctcgatacgccagttcatgcctcacagaacgtcctgcgggtgcgcaacctgtgcgctccgacgcagccctgctatccccctgcgcgtgaccgcttccactggcgggtgctcagtcaccttggttctaactttttatcgatgatggataacgccgaaattctgcgcggcacgctggcactgtacgactggaccgaaagcgagatgaaccgccgtcgtctggaggcgattgtcgacgttcagcacagcctgatacagcgttttgaaagaggctttctgctgcgtggcgtggatattcaggtgacgctggacagtaacggctttgccggagaaggtatatcacgctgtttggtaactgctgcaccgctttttcgcactgta

SEQ ID NO: 802 - protein, 553 aa, Escherichia coli
MDDLTQRYYEAEMRYLREAGKEFAQAYPDRAAMLNLDKPGARDPYVERLFEGFAFLMGRLREKLDDDLPELTEGLVSLLWPHYLRTIPSLSVVELSTDHRQMKQSETLKEFQVLSRPIGERRTRCVYSATRDITLHPLALPDVSLQYEPDGRSVIRLRFACGPLVGDWSQIDLSRLPLYLNADSPVACALHRALTLGTQQFWLRLPGQERRVLDAHFSPMGFDDDDRLWPKGESAFSGYQLLLEYFTFREKFMFVALNGLENVIWPERITGFEIDVVLAENWPHDLPFNTDNLRLHCVPVINLFPLEADPLHLSPLENEFLLRPMRIQDGHTEIYSVDNIISSRHTGSQAYVPFSSFRHRGGMLRHDAPERYYHTRVKRGPSGLHDTWLILGGDAFDTDRMLEDETLSLSLTGTNGQLPRKALQSTLLDTPVHASQNVLRVRNLCAPTQPCYPPARDRFHWRVLSHLGSNFLSMMDNAEILRGTLALYDWTESEMNRRRLEAIVDVQHSLIQRFERGFLLRGVDIQVTLDSNGFAGEGISRCLVTAAPLFRTV

SEQ ID NO: 803 - DNA, 1077 bp, Escherichia coli
atggacagagcatcacagccagcgcgtaccgggctgaccgaccggctggccccggatattgcgcggatcaatttttaccgtttttgccagttgctggaacagagccagcagaacgcgccgctgggcagtaccgacagccccgccaccgatgcggtgcgctttcgtcctcatcccggtatgggctttccggtcagcgagttaaaaaacgttgaacgtgacgcgggcaatcccgacgcgccccccacggtgcgcaccacctttctcggcctgtacggcgtggattcgccgctgcccaccgcctatctggactacattacccagcgtcatgacggacatgacgcagtgatggcgtttctcgatatttttaaccatcgctttattactcagtactaccgcatctggcgcaaatataactacccggcgtcgtttgaagcaggtgccgtggatgacatttcccgttgtctgctgggactcatcgggctgggtattcccggcagcgagaaccatatcgccacgccggtatcccgttttctggccctgctcagcgtgatgcgcctgccgacgcgcacggcggaaggcgtcacggcactggtagggctgcttgccccgctgaccaaagcgacggtggtgcctcacgatccgcagcctgtaattctcccggcccctgcgggtctgtcaaaaaattcacgcatcagcctgaaaacgcgaacgctgctggggcgtaccggtaccgacgccaacagccagttgctgctgaaactgtataccgaagatgccgcagaagcacgtggctggctgcccgacgggcaactgcacagcgatttgctggtgctgctgcgcgtttatctgggctggcgctgtcaggcccgtctgcaactgacgctgcccgtcagcctgttgcctgctgcccggctgggaaaacagcgtgtacagattagccgtaccggcatccttcgcgcctcctttgccgcgcccgcgaccggaacagtgacggtcagtctggggcgttatcagggattaatacccgctttttccattcgtaacagggagagtatgactcatgtttcctattcgttt

SEQ ID NO: 804 - protein, 359 aa, Escherichia coli
MDRASQPARTGLTDRLAPDIARINFYRFCQLLEQSQQNAPLGSTDSPATDAVRFRPHPGMGFPVSELKNVERDAGNPDAPPTVRTTFLGLYGVDSPLPTAYLDYITQRHDGHDAVMAFLDIFNHRFITQYYRIWRKYNYPASFEAGAVDDISRCLLGLIGLGIPGSENHIATPVSRFLALLSVMRLPTRTAEGVTALVGLLAPLTKATVVPHDPQPVILPAPAGLSKNSRISLKTRTLLGRTGTDANSQLLLKLYTEDAAEARGWLPDGQLHSDLLVLLRVYLGWRCQARLQLTLPVSLLPAARLGKQRVQISRTGILRASFAAPATGTVTVSLGRYQGLIPAFSIRNRESMTHVSYSF

SEQ ID NO: 805 - DNA, 534 bp, Escherichia coli
atgtttcctattcgttttaaacgtccggcgttgctctgtatggcgatgctgacggttgttctgagtggctgcggcctgattcagaaagtggtggatgaatcgaaaagcgtggcctcagccgttttctacaaacaaatcaaaatactgcatctcgatttcttctcccgcagcgccctgaatacggatgcggaagatacgccgctttccacgatggtgcatgtctggcaactgaaaacccgcgaagattttgacaaggcggattacgacaccctgtttatgcaggaagagaagacgctggagaaggacgtactggcaaaacacaccgtctgggtaaaaccggaaggcacggcatccctgaatgtgccgctggataaagagacgcagtttgtcgccattattgggcagttttatcaccctgatgaaaaaagcgacagctggcgtctggtgatcaaaagggacgaactggaggccgacaagccgcgctcgattgaactgatgagaagcgacctgcgactgctgcctctcaaggataaa

SEQ ID NO: 806 - protein, 178 aa, Escherichia coli
MFPIRFKRPALLCMAMLTVVLSGCGLIQKVVDESKSVASAVFYKQIKILHLDFFSRSALNTDAEDTPLSTMVHVWQLKTREDFDKADYDTLFMQEEKTLEKDVLAKHTVWVKPEGTASLNVPLDKETQFVAIIGQFYHPDEKSDSWRLVIKRDELEADKPRSIELMRSDLRLLPLKDK

SEQ ID NO: 807 - DNA, 426 bp, Escherichia coli
atgtcgacaccttccttatatgaaatgctgacgttcagtttcagcggcgagttaccgctggaacagatcagcgagcgggatcagcttatcctttccgtgatggacaatatgcaacgcattatcaactgccgggcaggcacgctggcgcatttgccggattacggtctgccggatctcagtctgatccatcaggggatggctgcgggtattcatggcctgatgcgtcagattgaagaaacactgctgcgttatgaaccacgcctgagtcagatacaggtggaattactcccccagccccgtccggggcatcttaattacctgatccacgcgcagcttcccgataccggctggatacgctttgatggcgtattttctccggaaggacgaattgttctgcgtcatctcaaacaacaggagcgggcgtac

SEQ ID NO: 808 - protein, 142 aa, Escherichia coli
MSTPSLYEMLTFSFSGELPLEQISERDQLILSVMDNMQRIINCRAGTLAHLPDYGLPDLSLIHQGMAAGIHGLMRQIEETLLRYEPRLSQIQVELLPQPRPGHLNYLIHAQLPDTGWIRFDGVFSPEGRIVLRHLKQQERAY

SEQ ID NO: 809 - DNA, 1374 bp, Escherichia coli
atggcaagtaacgcgaattttatcagccagttcgtcatgggcggcgatccctgtacttataaggaatccggtgaactgcaggctgaaatgagtaaactgactcacccggcccgaccggatgtggactggcgtcaggtggaaaaactctgcctcgcgctgttccggcaaaatggcgtggaactacagacgctggtctgttacgtactggcgataaccagacggcaggggctggcagggatggcagacggactcggttcactggatatactgctccagcgctgggctgacttctggccggtacaggtacattccagaatatcactgctcagctgggtcacagaaaaaatgcagcaggcactgagaacgctggatattcagtatcaggatctgccgcagatctaccgttgtgtacagcatctttccgccatcgaaaccacgctgcaacagtgtgaactgtggcatatgacgaaactggatctactggccgggcagtttcgcaataccgcattgcgtctggaacggctggcgcctcagggagcggaaaccactatcactccccctgaattaccccgccgggaaatgaatcaaccgaaaaagtcagaggaaagtccacagccggtttttgcaaccagatccgttcagcaaaacgataaggatgccagtccacccgttccatcccctgaaatctcccggcagcggacatggccgatatttatggccggaatggttgtgatggccggtctcggcggaacaggattatggggctggtcgcagcttaatcagccggacgcgctaatccagcgaatacaactgtctgtcatgccgttgccgctgtcgctggagagcggcgaactggcaaagctggatgtaaaggataaggcgctgctggctcaggacagaacaattgcggcaagtcagatgcaactggagcagttaaacaaattgcctgcccgctggccactggagcagggatatcgccagctacgccagcttgatgccctgtggccggataatcctcaggtcagggcgctgaacgcgcagtggcgcaaacagcgggagctgagcgccctgtctgctgaggcactgaatggctatgctcaggcgcagagccagctacagcgcctgtcggcgcagctggatgcactggatgaacgtaaggggagatatctgaccggttcggaactaaaaacggcggtgtacggcatccggcagtcgttaaaggagccgccgctggaagaactgcttcggcaactggaagagcaaaaacagaccggagaggtttcgccaacgctgttgacgcaaattgatacccggttaaatcagttgttgaatcgctatgtcattttactggatacgaaggtggaacaaagtcag

SEQ ID NO: 810 - protein, 458 aa, Escherichia coli
MASNANFISQFVMGGDPCTYKESGELQAEMSKLTHPARPDVDWRQVEKLCLALFRQNGVELQTLVCYVLAITRRQGLAGMADGLGSLDILLQRWADFWPVQVHSRISLLSWVTEKMQQALRTLDIQYQDLPQIYRCVQHLSAIETTLQQCELWHMTKLDLLAGQFRNTALRLERLAPQGAETTITPPELPRREMNQPKKSEESPQPVFATRSVQQNDKDASPPVPSPEISRQRTWPIFMAGMVVMAGLGGTGLWGWSQLNQPDALIQRIQLSVMPLPLSLESGELAKLDVKDKALLAQDRTIAASQMQLEQLNKLPARWPLEQGYRQLRQLDALWPDNPQVRALNAQWRKQRELSALSAEALNGYAQAQSQLQRLSAQLDALDERKGRYLTGSELKTAVYGIRQSLKEPPLEELLRQLEEQKQTGEVSPTLLTQIDTRLNQLLNRYVILLDTKVEQSQ

SEQ ID NO: 811 - DNA, 945 bp, Escherichia coli
atgaaaaatgttctggtcaccgtccccagcttttcagcacgctgtgtttccgccagcaagttgctaagagagaataattttaatcttattattaagaataatatggagcatctgcttaaatcagaatccactgcattacgagaatctatttgcgcggtcatcgccggaaaagatggttatcaggcggacacgctatcattgctgcctggtgtgagaataatatcgagattcgggacggggatagacaatattgatcttcgtgcggcacagcaatccggtattgttgtcaataatgcggttgggattaattcaaatgcggttgcggaatttatcattggacttatcttcgcgagcatgagaaatatccctggcagctatcatgcgatgcaaaatggctactggggtgagtcgcatggctgtgaattacaagggaaacggattggcctggttggctacggtaatataggtaaaactctggcgaaaaggttatccggttttgatgttgagcttttagcttttgacaaacaacccgactatcaggttgctgacaaagctggagttcagtttgtatcaattgaagatatctttatgcagtcgcatgtcatcattgttcttttgcctttttcttctgggctggagaacttcattagtcataaatatttgtcgatgatgcgcaatggtgctctgctcatcaatgtcgcaaggggaaagttgctggatgagggcgctttacttcaggtgattgaagaacgaaatgtgtttgcggcgctggatgtgtttagctctgaaccgttggcgcaatttagcccactgctacatgccaaaaatatcattacaacgccgcatatcgcggccgccaccgttgagtcataccagcaaaccgggatacacgttgcccagtcgataattgattacttcgcaggaagggagataaaaaacgtgttg

SEQ ID NO: 812 - protein, 315 aa, Escherichia coli
MKNVLVTVPSFSARCVSASKLLRENNFNLIIKNNMEHLLKSESTALRESICAVIAGKDGYQADTLSLLPGVRIISRFGTGIDNIDLRAAQQSGIVVNNAVGINSNAVAEFIIGLIFASMRNIPGSYHAMQNGYWGESHGCELQGKRIGLVGYGNIGKTLAKRLSGFDVELLAFDKQPDYQVADKAGVQFVSIEDIFMQSHVIIVLLPFSSGLENFISHKYLSMMRNGALLINVARGKLLDEGALLQVIEERNVFAALDVFSSEPLAQFSPLLHAKNIITTPHIAAATVESYQQTGIHVAQSIIDYFAGREIKNVL

SEQ ID NO: 813 - DNA, 594 bp, Escherichia coli
atgaataacacggatcttatccatctcattaaacattttatgcataacgaacttaaagcagtagaagaggttattgattccccactttctgaattcgctaatttaattaaagtattacaatcttgtcagggaaaagttgtttttattggtgttggtaagtccggtattattgccagaaaactcgcagcaacttttgccagtaccggaactccctcgttttttgttcacggtacggaagcggtacacggcgaccttggaatggtggcgaaagacgatgttgttattcttatttcaaacagtggtgagacggcggaaatcctggcgacactgcctagtttgaaaaaaatgggtaattatttgatctcttttacccgcagtcatcactcatcgcttgcgataagttgtgatttatctgttgaaatccccgtcaaaagtgaggcggataatttaggtttagcaccgtcatgctcgtcgactgttgttctggttgttggtgatgcggtggcgcttgcactctctgaattgaaaaaatttactcgtgctgatttcggcttatatcatccaggaggtgcactcggcattaaagcaaattca

SEQ ID NO: 814 - protein, 198 aa, Escherichia coli
MNNTDLIHLIKHFMHNELKAVEEVIDSPLSEFANLIKVLQSCQGKVVFIGVGKSGIIARKLAATFASTGTPSFFVHGTEAVHGDLGMVAKDDVVILISNSGETAEILATLPSLKKMGNYLISFTRSHHSSLAISCDLSVEIPVKSEADNLGLAPSCSSTVVLVVGDAVALALSELKKFTRADFGLYHPGGALGIKANS

SEQ ID NO: 815 - DNA, 3281 bp, Escherichia coli
ccgtctggtagaaggatttgctgtagacggatttaaccgattgtccgctgtgacgggtgtcatctgcaagtgtcgtattggcctgcgtaatatcgaaagaaaaggcaccaaaaagtcctaaatctttaccaataccaaggttgaaggcctgataatcttctgcaatttgcattccgccataaggtgtccagtttcctttcagaccatgcatcaagcttgcttgtacgaacttgggggtgctttgcaggttatttccactacgatattcccccatggcaagtgcataacgcgtatatccagcacgttggagaaccggaacagacgaataaggaacatataatgtctgaatactgccgtctgcctcttttatggttacttgcagatcaccaccattggccgcagagttgatatcatcaatagtaaaagggccgggtgggacagtagtctgataaacatcgtatccattctgttttacactcacttgtgcggtgccacgagcaataccatgaatcaccggagcgaaaccatgttggctatcgggcaacatcgcttctgttgaatttattttaaggccacgaaagttcacactgtcaaaaatatcgccatcggtataactatcacccactgttaaccgtgagcgtaacggaataatgtcacgttcagccgacgtattgatatgctgccatttattgctgtcagatgaattgctactcccactgttataactccacgttgagttatcgcgcagtcgccaactaccaatgttgatgccactctgtaaattcaaatatgcatagttggattttcctgcattatggttactacggttattaatagaattaccattaaaactatagtttagtagcccggcatttattccttcttcccacagatcaggagaaacatagccgcgagccattctgccgacatatatttgcggaacggagagtgacagatgttgctgaccaacatcaaactcagatgatgcgtcagccaaacgatcctgaagtggtgtgcatgcgctgttgtccggcacatgtttatctgccgaatgttccttgttgtctaataatgctgatttttttatgccaagactgacaagaaggtctgtactcaggcatgggatgagatctgcgttattatcatctgcaataaaagtaatatcccgactagccataaattcgtcgttcaaataaatgtcgacccgatatgtaccaggtggggcctcgcgtcccttagtaaaggcagataaatcgacagattcagcaaggtcattgcttaaaaaccgtggattaaaataatactctgcgtcaacgggaaaaaccgcagttgctaagccaagggcaaaggtaagccgtgcaaagcgaggcagtattaacacctgatgcatacgatatgccttaaatgcggcacgaaaggctgtcatttttaatcccgattgagtttattattaattaggtcactggcttactgcatggttgccttaatacgcggagttaatgcaccgtaatcattgattgtctgaaaactgatatccccggttacagcatgcgggatatccaccgatacttcaccttttggcggcaccatggtgtttgggagattgctatttcctgctttcatatttgttacggtaatgaagtagggcgttggattaataagagtgagtttgctaccgctgcgacgaaaccgaagcattgcaggcgcttcttcaggtgccattgccagatgcgtggggcgataaaacatttttatgcggctaataattgccagctgtaatgtattctcattcttctggtctttttccatagcagggatagctttaacattaacccagaacaggctttcacggtcgcctggtaactgatgattagtggcgttgattatccgaagcgtattctcttttttaccttgcatggaaaaaagcggtggggtaatgacaaactgggtatctttctggtcacccgcattttctatccatgactgaatgagatagacactggcaggatcattattcgtgacaggcaataaaacctgtttctggtttgccggataaattacccgcgtcgcaccaagtgcgacagctgcgttggcaatggtgctatggcaagcaaagagcaataaaagtaacactgtcgccataaaggaaacagagtagggggtacgcgtagtttgcatctgatgcattctccatgtgttaagaggataagcggggaaaccgttacatcagacaatcggtaaatattgctaatgcattggcgagtcgccggttttccagacttaatgcgtttgtaataaatgttggttctcttttgataggaaaaccttgctaccaagtaaatattttaaataacagcaagtttaactactgttgtttattgatcgtttagatattatgtgatttttcataccgctccaaaatacaaaccatttttcattaataatgagatgaacattggtgaatttctcgggtgtgcgtagccatgccacacacaccctgtttcaatttcagatgacgcatagtcaccttaagagtgaattatagatattgaactttgaaggtcgcatcagcgtttgcagtaccagctactgactgcccgagagcaatataacgagcctggaacggcagtatattcgtgccatcaatcaagtcagttttagcgctaaaagtagcaccatcaagtactaatacctcccctgtactgtccaaaatttggataccgacattttgggcagagcctgccgctgaactctgcagcgctaatgtatcgtcattactggtgacagtagtacccaggaatgcaacagctgcattactggaaacattggtatcacaatcattcagcttgatattgaagccaacggcggagctgaggtcacccgctttagccaggcgagaagaacgaacctgacccagctcaacagtttggttcattgattctgaatcaatcgcacaagcggcatttaccacttcacctttaaaatgaattacaccgccattaacagtggtcgttactgattcatcaccctcggctgcgcttaccgcagcagacgacatcgccaacacagaaacgacaataataccgacatgtttgagtttcataattctccaaaatttatatttaagtagctgaataaagagagttaacaattaagttattctgttattgcttataaaacaagaatcattcttgattggatgttgccctgagaatatagtttccatggttattacatttcacgaagaatgataatatctttaaattacaaggacacctatt

SEQ ID NO: 816 - DNA, 1425 bp, Escherichia coli
atgacagcctttcgtgccgcatttaaggcatatcgtatgcatcaggtgttaatactgcctcgctttgcacggcttacctttgcccttggcttagcaactgcggtttttcccgttgacgcagagtattattttaatccacggtttttaagcaatgaccttgctgaatctgtcgatttatctgcctttactaagggacgcgaggccccacctggtacatatcgggtcgacatttatttgaacgacgaatttatggctagtcgggatattacttttattgcagatgataataacgcagatctcatcccatgcctgagtacagaccttcttgtcagtcttggcataaaaaaatcagcattattagacaacaaggaacattcggcagataaacatgtgccggacaacagcgcatgcacaccacttcaggatcgtttggctgacgcatcatctgagtttgatgttggtcagcaacatctgtcactctccgttccgcaaatatatgtcggcagaatggctcgcggctatgtttctcctgatctgtgggaagaaggaataaatgccgggctactaaactatagttttaatggtaattctattaataaccgtagtaaccataatgcaggaaaatccaactatgcatatttgaatttacagagtggcatcaacattggtagttggcgactgcgcgataactcaacgtggagttataacagtgggagtagcaattcatctgacagcaataaatggcagcatatcaatacgtcggctgaacgtgacattattccgttacgctcacggttaacagtgggtgatagttataccgatggcgatatttttgacagtgtgaactttcgtggccttaaaataaattcaacagaagcgatgttgcccgatagccaacatggtttcgctccggtgattcatggtattgctcgtggcaccgcacaagtgagtgtaaaacagaatggatacgatgtttatcagactactgtcccacccggcccttttactattgatgatatcaactctgcggccaatggtggtgatctgcaagtaaccataaaagaggcagacggcagtattcagacattatatgttccttattcgtctgttccggttctccaacgtgctggatatacgcgttatgcacttgccatgggggaatatcgtagtggaaataacctgcaaagcacccccaagttcgtacaagcaagcttgatgcatggtctgaaaggaaactggacaccttatggcggaatgcaaattgcagaagattatcaggccttcaaccttggtattggtaaagatttaggactttttggtgccttttctttcgatattacgcaggccaatacgacacttgcagatgacacccgtcacagcggacaatcggttaaatccgtctacagcaaatccttctaccagacg

SEQ ID NO: 817 - protein, 475 aa, Escherichia coli
MTAFRAAFKAYRMHQVLILPRFARLTFALGLATAVFPVDAEYYFNPRFLSNDLAESVDLSAFTKGREAPPGTYRVDIYLNDEFMASRDITFIADDNNADLIPCLSTDLLVSLGIKKSALLDNKEHSADKHVPDNSACTPLQDRLADASSEFDVGQQHLSLSVPQIYVGRMARGYVSPDLWEEGINAGLLNYSFNGNSINNRSNHNAGKSNYAYLNLQSGINIGSWRLRDNSTWSYNSGSSNSSDSNKWQHINTSAERDIIPLRSRLTVGDSYTDGDIFDSVNFRGLKINSTEAMLPDSQHGFAPVIHGIARGTAQVSVKQNGYDVYQTTVPPGPFTIDDINSAANGGDLQVTIKEADGSIQTLYVPYSSVPVLQRAGYTRYALAMGEYRSGNNLQSTPKFVQASLMHGLKGNWTPYGGMQIAEDYQAFNLGIGKDLGLFGAFSFDITQANTTLADDTRHSGQSVKSVYSKSFYQT

SEQ ID NO: 818 - DNA, 717 bp, Escherichia coli
atgcatcagatgcaaactacgcgtaccccctactctgtttcctttatggcgacagtgttacttttattgctctttgcttgccatagcaccattgccaacgcagctgtcgcacttggtgcgacgcgggtaatttatccggcaaaccagaaacaggttttattgcctgtcacgaataatgatcctgccagtgtctatctcattcagtcatggatagaaaatgcgggtgaccagaaagatacccagtttgtcattaccccaccgcttttttccatgcaaggtaaaaaagagaatacgcttcggataatcaacgccactaatcatcagttaccaggcgaccgtgaaagcctgttctgggttaatgttaaagctatccctgctatggaaaaagaccagaagaatgagaatacattacagctggcaattattagccgcataaaaatgttttatcgccccacgcatctggcaatggcacctgaagaagcgcctgcaatgcttcggtttcgtcgcagcggtagcaaactcactcttattaatccaacgccctacttcattaccgtaacaaatatgaaagcaggaaatagcaatctcccaaacaccatggtgccgccaaaaggtgaagtatcggtggatatcccgcatgctgtaaccggggatatcagttttcagacaatcaatgattacggtgcattaactccgcgtattaaggcaaccatgcag

SEQ ID NO: 819 - protein, 239 aa, Escherichia coli
MHQMQTTRTPYSVSFMATVLLLLLFACHSTIANAAVALGATRVIYPANQKQVLLPVTNNDPASVYLIQSWIENAGDQKDTQFVITPPLFSMQGKKENTLRIINATNHQLPGDRESLFWVNVKAIPAMEKDQKNENTLQLAIISRIKMFYRPTHLAMAPEEAPAMLRFRRSGSKLTLINPTPYFITVTNMKAGNSNLPNTMVPPKGEVSVDIPHAVTGDISFQTINDYGALTPRIKATMQ

SEQ ID NO: 820 - DNA, 561 bp, Escherichia coli
atgaaactcaaacatgtcggtattattgtcgtttctgtgttggcgatgtcgtctgctgcggtaagcgcagccgagggtgatgaatcagtaacgaccactgttaatggcggtgtaattcattttaaaggtgaagtggtaaatgccgcttgtgcgattgattcagaatcaatgaaccaaactgttgagctgggtcaggttcgttcttctcgcctggctaaagcgggtgacctcagctccgccgttggcttcaatatcaagctgaatgattgtgataccaatgtttccagtaatgcagctgttgcattcctgggtactactgtcaccagtaatgacgatacattagcgctgcagagttcagcggcaggctctgcccaaaatgtcggtatccaaattttggacagtacaggggaggtattagtacttgatggtgctacttttagcgctaaaactgacttgattgatggcacgaatatactgccgttccaggctcgttatattgctctcgggcagtcagtagctggtactgcaaacgctgatgcgaccttcaaagttcaatatcta

SEQ ID NO: 821 - protein, 187 aa, Escherichia coli
MKLKHVGIIVVSVLAMSSAAVSAAEGDESVTTTVNGGVIHFKGEVVNAACAIDSESMNQTVELGQVRSSRLAKAGDLSSAVGFNIKLNDCDTNVSSNAAVAFLGTTVTSNDDTLALQSSAAGSAQNVGIQILDSTGEVLVLDGATFSAKTDLIDGTNILPFQARYIALGQSVAGTANADATFKVQYL

SEQ ID NO: 822 - DNA, 2178 bp, Escherichia coli
atcactcaattaaggtgaacggtcatcaagaaatcacatccaccagcaggacgtgtgaccatctaatgatcgaccttgaaaccatgggaaaaaatcctgatgccccgatcatctcaataggtgcaatatttttcgatccgcaaaccggagatatgggaccggaatttagtaagactatcgatctggaaactgctggcggagtcattgatcgggacaccattaaatggtggcttaagcaatcacgcgaagcgcaatctgccattatgaccgatgaaatcccgttagatgatgcactgttacaattgcgggaatttatcgacgaaaactccggtgaattttttgttcaggtctggggaaatggagccaacttcgacaacacgattttgcgccgttcatacgaacggcaggggatcccctgcccgtggcgttactacaacgatcgcgatgtacgcacaatcgttgagctggggaaagccatagacttcgatgccagaacggctattccattcgaaggtgagcgccataatgcacttgatgacgcccgttaccaggcaaaatacgtttcagttatctggcaaaaactgatcccgagtcaggctgatttttaatgttcaaccgtcgccagttgtcgttgatattctgcaactggcgcgttccggagtgatagccatgagcgaacagtacctgataacgctcgacgagtggaaaccaaaacggttcagtctcccaataacaaacactaccctggtgaaatacggaaaactaggatacatcgttccaaggccacaaaaaattcgtgggcgttggctgatagatcgccgagcagtatttgttgggcctggtgaaacgggaattgcgccggaaattcatactggcgatgatgatgcactgaaggagattttaactcatgtcaccgaggccacgaaaaaacagcactgacgtagccggtctttacgaaaagtttgatcgcagaactggcagagtttactaccagtataaaaatcctgtgactggaaaatttcacggactcggaacagacaaaggtaaggcagaaaaaatcgcttccacagccaatcagcgaatagctgcagcagaagctgaatatttcatgcgcaaaattgatgaaagtccgtcagcaacaaaacgtcggggtatcagattaaaggcatgggttgatcgatatctgaaaatacaggacacgcgactgaaaaatggagatattgcagctacaactcacaaagaaaaaactcgaatggctgcatacctggtttcccgtctgggaaaccacccattgaaagaactggaagtaagagactttgcattaatactggatgagtggctggataaagacatggtcagcacagcgagagtaaatcgtggattatgggttgatatttataaagaagcacagcatgcaggggaagttcctcctggatggaatcctccggaggctacccgtaaaccgatccctaaagtaaccagagccaggctcaccatggaagactggcaaaaaatttacaatgcaacgcctgaaaaacactttatccgtaacgcaatgcttcttgcgattgttactggtcagcgccgtgatgacatttgccacatgcgtttttcagatgtgtggaacgaacacttgcatatcacccagggaaaaaccggaatgcgtctggcgttaccgcttacactacgctgtgatgccattgggataacgttaaaagaagttattgatgggtgccgagacagaatattaagtccatatctaatccatagtcggcaccagaaacaaccgaagccgatgagtaaagacaacctgagcgactactttgccaaagcacgggatctggctgggataattccaccagcaggaaaaacttcgccaacatttcatgaacaacgctctctatcagaacggctgtaccgtgcacagggtatcgatacaaaaacattactaggacataaagtccaggcaaccaccgatcgctataacgatactcgaggtcaggaatgggttaagttggttatttgacaaacaccatatggaatatccgtcaccatctcaggaaaaaagtgttgtaaaatgcgtggcctagttttggggaaacgttttggagagattttggagaaagggaaaaattgaataaattcaaaatcctgaaagtgtcccgccttatgaataag

SEQ ID NO: 823 - DNA, 342 bp, Escherichia coli
atgaccgatgaaatcccgttagatgatgcactgttacaattgcgggaatttatcgacgaaaactccggtgaattttttgttcaggtctggggaaatggagccaacttcgacaacacgattttgcgccgttcatacgaacggcaggggatcccctgcccgtggcgttactacaacgatcgcgatgtacgcacaatcgttgagctggggaaagccatagacttcgatgccagaacggctattccattcgaaggtgagcgccataatgcacttgatgacgcccgttaccaggcaaaatacgtttcagttatctggcaaaaactgatcccgagtcaggctgatttt

SEQ ID NO: 824 - protein, 114 aa, Escherichia coli
MTDEIPLDDALLQLREFIDENSGEFFVQVWGNGANFDNTILRRSYERQGIPCPWRYYNDRDVRTIVELGKAIDFDARTAIPFEGERHNALDDARYQAKYVSVIWQKLIPSQADF

SEQ ID NO: 825 - DNA, 276 bp, Escherichia coli
gtgatagccatgagcgaacagtacctgataacgctcgacgagtggaaaccaaaacggttcagtctcccaataacaaacactaccctggtgaaatacggaaaactaggatacatcgttccaaggccacaaaaaattcgtgggcgttggctgatagatcgccgagcagtatttgttgggcctggtgaaacgggaattgcgccggaaattcatactggcgatgatgatgcactgaaggagattttaactcatgtcaccgaggccacgaaaaaacagcac

SEQ ID NO: 826 - protein, 92 aa, Escherichia coli
VIAMSEQYLITLDEWKPKRFSLPITNTTLVKYGKLGYIVPRPQKIRGRWLIDRRAVFVGPGETGIAPEIHTGDDDALKEILTHVTEATKKQH

SEQ ID NO: 827 - DNA, 1116 bp, Escherichia coli
atgtcaccgaggccacgaaaaaacagcactgacgtagccggtctttacgaaaagtttgatcgcagaactggcagagtttactaccagtataaaaatcctgtgactggaaaatttcacggactcggaacagacaaaggtaaggcagaaaaaatcgcttccacagccaatcagcgaatagctgcagcagaagctgaatatttcatgcgcaaaattgatgaaagtccgtcagcaacaaaacgtcggggtatcagattaaaggcatgggttgatcgatatctgaaaatacaggacacgcgactgaaaaatggagatattgcagctacaactcacaaagaaaaaactcgaatggctgcatacctggtttcccgtctgggaaaccacccattgaaagaactggaagtaagagactttgcattaatactggatgagtggctggataaagacatggtcagcacagcgagagtaaatcgtggattatgggttgatatttataaagaagcacagcatgcaggggaagttcctcctggatggaatcctccggaggctacccgtaaaccgatccctaaagtaaccagagccaggctcaccatggaagactggcaaaaaatttacaatgcaacgcctgaaaaacactttatccgtaacgcaatgcttcttgcgattgttactggtcagcgccgtgatgacatttgccacatgcgtttttcagatgtgtggaacgaacacttgcatatcacccagggaaaaaccggaatgcgtctggcgttaccgcttacactacgctgtgatgccattgggataacgttaaaagaagttattgatgggtgccgagacagaatattaagtccatatctaatccatagtcggcaccagaaacaaccgaagccgatgagtaaagacaacctgagcgactactttgccaaagcacgggatctggctgggataattccaccagcaggaaaaacttcgccaacatttcatgaacaacgctctctatcagaacggctgtaccgtgcacagggtatcgatacaaaaacattactaggacataaagtccaggcaaccaccgatcgctataacgatactcgaggtcaggaatgggttaagttggttatt

SEQ ID NO: 828 - protein, 372 aa, Escherichia coli
MSPRPRKNSTDVAGLYEKFDRRTGRVYYQYKNPVTGKFHGLGTDKGKAEKIASTANQRIAAAEAEYFMRKIDESPSATKRRGIRLKAWVDRYLKIQDTRLKNGDIAATTHKEKTRMAAYLVSRLGNHPLKELEVRDFALILDEWLDKDMVSTARVNRGLWVDIYKEAQHAGEVPPGWNPPEATRKPIPKVTRARLTMEDWQKIYNATPEKHFIRNAMLLAIVTGQRRDDICHMRFSDVWNEHLHITQGKTGMRLALPLTLRCDAIGITLKEVIDGCRDRILSPYLIHSRHQKQPKPMSKDNLSDYFAKARDLAGIIPPAGKTSPTFHEQRSLSERLYRAQGIDTKTLLGHKVQATTDRYNDTRGQEWVKLVI

SEQ ID NO: 829 - DNA, 48254 bp, Escherichia coli
ctgaggaaggttgttatcccttttctggcgtattcgtcattccattcgtatccccggtaccggatgtttatatcgtactgtgccggtgcttgcgtgctttcctgcaggtctgcaccgatttaacaaacaaaacttaacagagtctgaaggagtagtatttcgtgcaaataaccgaagcgttattttcagagcagggagacatccggcgttttgttcagcaggcggtggaccactggacgcatctgctggcagtccacttcacactccattcggcagaaggaaatatcaacgggcaacagattcatgcattctgtacttccttttatgaacgtattactgagcgtaatcacacgaccagtccatcatcgccgctggtattacgctggttgcgggaacaactacatggaggagcaacaatacgatgcctgttgctgctcagccagacgagcatttgccatccgcgagccagtgtgacaggtgatgaagcatgttcacaactggtggatttactgcaacagacctggcgggtgataagtgctggcggacaatgtcgggtggaaagttttttttcgggttgcccggcctgatacatcagagcaatacgttgctttaaaaactgctgttcagtctctgatgctatgggttattgcaacaatcatccggtgatggacgggagaaatatcgactcttccgttagtttttacaggctgataaagttttgccagctgaatctttatacggaatactctccagtatgcgtaagagaatttgctttttggaggggggcgacaaccagatggtaaacaaaagaatggttgaatgtggatgaggttcatattcattgattcagattttttgaagaatcaccacatgggatgtccatgtggttgtataactcagggccagcgcttaatgatgatggatgtattaatgccgccaaaggcaaagttgttactctgcaaaaactcacaatcaacctttcgggcttcatgcatgatgtaatccagcgcgccacagttcgggtctggtttattcaggtttagcgtaggcgcaaaccaaccttcgcgcatcatttgcagactcatccaggcttcgagcgcgccacaggcaccaagcgtatgaccaaaataacttttcagcgaggagaccggcacattatcaccgtaaatggttgctgtcgccagactttctgccatatcaccgcgatcggtcgccgtaccatgcgctgaaatatagccgatatcttgtgcacttaacccggcgattttcagcgattgctccatacaatactgcatggtttcgcgctgtggctgggtaatatgtgccgcgtcgcagttagtcgcaaagccgacgatttcaccgtaaatggtcgcgccgcgcgctttggcgtgctccagttcttcgaggatgagcgtacctgcgccttcaccaatcaccagcccgtcgcggttttcatcgaacggtgaaggtgtggttttcggcgcatcattgtgctggctggtggcaaaaagcgtatcaaataccgctgcttctgaagggcataactcttcggcaccaccggcaaccatcaccgtttgataaccatggcgaatggcttcccacgcgtagccgatagcctgactacctgacgtgcaggcgctggaggtcggaatcacccgcccgcgcagtccaaaaaacagcccggtgttaacggcagtagtgtgcggcatcatctgcacataggtggtgccagtgatgttgttcgtgtgcttttccgtcagcatggtggcgaactcgcttaccgggccggtactgccggtcgatgagccgtatgcaatgcccgtttcgccgctggttaatatcggatcgccaatcaaccctgcctgctctaacgccagctcgctggcacgggtcgacatttgcgacacgcggcccatcgcacggatacgcttgcgggtgtagtgctccggcagcgtgaaatcatcaacaggcgcgccaagcagggtgtgcaggccgtcgtaaacctgccactccggcattttgcgcaccgcattttcatacgccagtaagcgtgcagaaacgtcctgccagttttcaccaaaggcagtcacgccgcccattcctgtaatcactacgcgacgtgtcataacatccctccattgatggaaataacctggcgggtgacgtaacccgcaatatcagacattaaatagctggcaagcccggcaacttcttccgcctggcccatgcgtttcatggggatcatcgacattgcctctttcagagcgctctcttccatttcgatcatcccggtatcaataagccctggcgcgatgcaattgacggtgattttgcgcttcgcgagttcgatagccagtgcttttgttgcgccgataattccggctttggcagcgctgtagttcacctggccgcgattgcccattacgccggaaaccgaggacagcgtgatgatgcgcccaccctggcgtgcgccgatcatcggcataatgcacggctgaatgacgttgtagaaactgtcgaggttggtgtggatcaccgcatcccagtcgtcattgcttaaagccggaaaagcggcatcgcgggcgatcccggcgttactgaccacgccgtaccaggcaccatgttgcgcgatctcgtgctccagcacttcccgacactgttcgcggtttgcgacgtcgaaactgagcaaacgcccgttacccccgttggcgacaatggcgttcagcgtttcctgagcgcccgcggcgtcacggtgatagtgaacgccaatgttaaagccgtctgccgccagttggcaggcgatggcgcgaccaatgcctttgctggcaccggtaaccagaactgaacgactcatcaggacgctccttgttgaaacagggtggtaagttcttccgcggtcggctggaaggtgttaatgcggcccgtcgcctcgccgtcgttgatgctgcactcaaaactgccgaagcgatcgtcctgcatcagcagcttgacggtaatagtcagcgtctggcctgcgggcagaatgccagcggtgcaaagcaattcacgcgcgcccagtatcatccctaactcaatactgtttttgccctgctggtggcgatgccagccagaccagacgccgacggtttgcgccatcagttcaagggcaaaccagccagggagattgccgtccgggtcgagaaacggtgccagtacgccactgggcgaaaccgtcacgcggcacaccgcgctgtcatcgctgacgctcaccacgtcttccagcagtaacatgggcgcgtcgtggggcagataagcgccgggggataaatagtggctcacgaaaccctcccgagcagaatgctggcgttattgccgccaaaggcgaaggaattggacaggatcaccggacgtgccagcggctgcggtttttcgataatgccacacggtggcagcgtgggatcgcgcggcgacagactgaagtcctgagcgggcagcggtaaatcacgctgtaaaatcaacatactaattgctgcctcggtaatgcccgctgcgcccagcgtgtgtccggtcaaatgtttggtggagctgcacggtacgcgttcgccaaacagggcgttaaccaccattgattcaatctggtcgttgagctgtgtggcggtgccgtgcaggttgatatagccgacgtcatccggcgtaagctgcgcatcggtcagcgcctgattaatagcgcggatcgctccttcgccctgcggatgcggggctgaaatatggtaagcgtcgctcgattcaccaacgcccagcaacgcgatgggctgcggttcccgggtcagcagcattagccccgccccttcaccaatggtgatacctgcgcggtcacgaccaaacggctgacataaggttggcgacagcgattcgaggctgtgaaaaccgttaatcggcatccggctcagggtgtctgcgccacccacaatggcggcatcgaccagccccgcttcgataagcctgcgcccgctgattatcgctctggcgctggaagagcaggcggttgaaagggtataggccgggccgtcgagcgccagccagtggctgagaaaacgcgacggatcgccgagttcctgttgcgcgtagtgccatgtggtgctcggctgcccgtgggtgcgcaggttaacgtgcgtgtcgccttcatgcaggccggaggtgctggtgccaagtacaatcgcgatgcgctcgcgaccatatttcgctatagcgtcatcaacctgcggctggagctgcgccagcgccgccagcaggatctgattgttgcgcgagcggtgcgcagcgaatttttccgggataagcggaagctcgccatccacgccagccaggaccgcctgcggatgcccctgcaaccagcctgcgcgcgggcgcattccgggagcaacaccgcgagtcaggttggttgcgatttcgtcaaggttatttcccagggcgttgatcatgccgacggcggaaatataaatcatatcagtcacctaagtattgaatggtgatgtggtatttaaagacatgctgctcaatgctgattggcacgcgttttccctggcgattcagataggtgatttccgtgaccagtttgccgctggcgttacgcagctcgcgtttgtcgccgttgtcgcgaagcgtccagcctgtgggaagttgcggttgccaggcgctaatcggccagtggctgagcatcacgtcagccagtacctgacttgcgggcggtaactgtgggacgacgatggattgctcggcgcgtagcccttttgcatcgtaggtcaccagaaacaggcgaatgccgaccgacgacagcccggcaagggtgattttctgatcttcggcattaagcatcactagcagagactgggttttgccgttgaagctgccggtcaacagttgctgggaattgactgcgggtgaaatccccggcgcaggcagcgtgatgagcgtaccaggttgcagccacgcctgcgggcggccttcctgttccggttgcgagtggctacagccagtgaggataagcgtagcggtcagggcgagcgctcgccagaatgtggatttgatcatttttttgttctctttttatcgggcatcgccagcggcgaaagcaggaaggcggtgaaaataccgctcaccagcacaatgccaaaactgctgatggcctgggtggcgctgaataccagcattcccagcgtcagcaaggtggtgagcattgccagcgtgatcgccagtagggaagttaacggtgtaccgcgcggattactgaaaaacagcgtgtaattgatgccgatgccaagcaccagcaccagcgccagcagcgaaaagagattcaccgcctgcccgctaatcgccagcacagccagaccgcagcccagcgaaagcaccgaaggcaccaggctgataaaccctttgcgccagccgaggcgggccactgcgccgcaggcaattactgccagcgccaccagcaacaagccggttaacacataacggtaaagtgcgaacaattcatcaaaggtgtttttgcgatcaacccaggcaatgccacaagggtaatagctggagatttcctgtagcgccgcgctatttttaaccccttcaaccggcaccagcacgccgcttgcgccattttccagcgtcagccacagcagacgccagccttcactggcggggcttgccagccattcatcaaccttcaccggcatggcgttgagatccgggttcactgttgtcacgcccggcattttgcagtgcttttgttactgtcggggccgctgttgtcagcagatgtaaatcttcctcctgccgcgcaagggagttcagtggaatggtgcggtatttgctgataagcccgtcttttttcgccttctccagcgaggtggtaaatttctccagtcgccgtaatgtttgctgtggggagtcgccgtaaaccacgaaccatttttgatcgacgctctgcccggtcagggcggtaatggctttctcctgcgccagaatatgctgcggcagcgcctgtaactgcgagatatcgtcatcgacgcgtagcattgacatccccgccagcgaaaacagcgccagcgcgacggacagaccccgcgacagttttttattgcgccgccacgctgccagccagcgtagcatcagcgccatcgccggaaccggacgcaccggcaggccacggcacagccacggatgccagaacaggacggtcagacaggaggcgctcaacccgatggcggcaaaaatcgccatctggcggataccggggaagggggcgagcatcataatcagatatgccgccacggtggtgagcagcgccagcagcagggcattgcgtactttcgccaggctttgccacggcgaaacgtcgttgccgtgcaccatccgctcggtgagataatagagcgtgtagtcagcggaaatgccgataacgctcatgctcatcaccagcgtcatcaggtgtaattcaccgaaaatcaataaagtggcgaccgttcccgccagcgcgccgatgccgatggaaatcacgcaaagcaacaatgggcgcaaagagcggaacaccgccacaatcagtaatatcacccccagcagcgttgccacgcccagggttgagatatcctgcttcgcctgttgactggcgtaatcgctgtaaaataccgtgccgcgcgagagcaactgcgcctgtgggtaacgcgttttcagatccttttccagcgtattcagggtcgtgatgagctggtgggtttgctgcatatcaaacgacgatcccgccagttcaccgtgcagcagataccagtagttgccctggggatcctgcgtcaccagccagccgtccatcagccgcaaacgctggccgtttttcgccatcgccagctgcgagccgcgcattaacatcagcggatcgttttgcagctccttgccgcttaccccggagaatgcggaataaagctgggagaggatccactgcgcctgcgcttcgccgccgttttgcaggcgggcgcgggtgtcggggtcaatcaggccgttgcggtgctgccagaaaaacgctccccacgattgctggctggcggcatccattggtcctttaacgtcgccgagcgcagcggatttttgcagcagcgtcagccactcctgagcgaccctgggattagcctctttaccggggctgaccagccacaccagttggcggtccagacgctgcataaagccgtcattcagcgctgggggaatatcgcccatcacctgtttgggtaacatagccagcacgctactgttcagccgtgattgcggcagcaggatcagcaacgccgccgccatgaccaggcagactagcccccataacagcgcggggcgtttactgggcggcaaaacgttggtgttcgtcatcggtcagttgcgctggcgtcagttgatgttgggtaagagcaatatcggtgcgatcgccctgtttatcattaagttgaatgctctccagataggttttcccggcgagatcgatggtgttgaaaattttatccagcggcgtggtggtcggcgtcaggcgcagcgtccagcggccttcgcctttgtcagcaaattcgacgcggaagttttgttccagcactttgcgatcggcctggaacagcgcgcgcagcaggtggttaaactggaacatctgcgggttgttttctgccgtgatgatttgcggcggctgaccgttgatcacctgcaccatgcgtttatcatccagcaatagctgcatggggaacggtgaggtttgatcccacaataacccctggtcgcgggcgatcaacatctgaccctgagatcgcagcggctgcggcagatctttaatcgtccgggtttgatcaaaatgggcgcggatcaccggttgttcggtaaagcgttgctgaagatcgtccagggtcagggcgctcacaaacgggctaatcagcagcgccagcagcggtaaaaatttcatggtttgactcccatgcgttcaaacagaatatcggggctgacaaagcacagttcgcgactttgctcgtcgaccgcgacctgaatggtgtatccggtggtggcgcgtttgcccgtttcggcatcgaaaatctgatagccaatccgcagacggttttcgaactcttcgatatgcgcacgcacgcggatgcgttgctcaaaggtgagggcgtggcgatatttcacccgcgcatcgaccactggccacaaataaccggactctttcatctgccgatagccgtaattgaactggttgagcagcgcctcgcgggccacttcaaagtagcgaaaatagttaccgtgccaggccacgcccatcatatcgacgtcgtgaaagggaatggtcagctcgacttcagcggtaaatcggggatcgttaagcaccctttactccttgtcctgaatttccggcagttgccagaaatcgaaaaaattaaaccagtcgaggggcgactggagcgcgtaatgttccagacgcgcggcgtagtggtcgatagcgttttgcagcgcctgttggcgttcgccacgcggcaacagcagcgggtcggcaaaggtttcgcagtgaatatgcagcttgccgtgctggcgtagggcgaaaatcagattcaccgggcagcgcaaaatagacgcgagaataaacggcccctgtgggaaaggcgcaggctggcccataaacggactccagcagacgcgccagtcgccgccgcgttgcgggttgacggcgatgcggtcaccgacaatcgccacccattcgccgttatccagcttctctttcagcaggatggcggtttccgggccgatatctgttaccggcatcaggttaatgcctgcctgaggagccatctcctgcattatctgtttaaagcgttgggcgttttcgctaaacaccagcgcgttaatggttttgtagccctgaatttttgccagcgcccggcacacttccacatcgccaagatgcgaggccagcagcaatttgccgcgcggatcgcggacgtcaagcgccgcttctgcgcctggcgcaaacagcacatcacgccccagttgtagctcgccgcgccagctggcgattttgtcgagcatggcattaccgaaacgtagaaagtgctgatagctgttgatttttgctgcctgtggttgttgttggcgcacacgggcgagccagtcttgcgacgctttacgcgcacgagcagcggtgagccagtagacgcccaccaccgggtaaagcagcgcggtaaacgccgttcttcccagcagacgccagaccagcagcatcaggcgcattccccataaccctttaacttcactctgccgcgcccagtggctggaagagtggcacatcagcagtgaaggaatacgcggcaacatgccgaaaaacagacgcgtgtgcatgagcgagatgcggacgttatctttcagggcatcaaaatgcgaaagcccgtccagcggataggtgacgcgggtcggcacgaaatagctggtatttccctgccagtagaggcgcaccatcacttcggtgtcgaaatccatccgcttgccgatggtggcgcgttttgccagttgcagcgtcggcgcaaccggataaacgcgaaaaccgcacatgctgtctttcagttgcagggagagcgtttcgatccatacccagacgtgggtgatccagcgcccgtacagccgtgagcggggaatggagtcatcgtaaattggctgaccggagatcagcgccgcagggtgttgttcagcgagtgccagcagtttggggatatcttcaatcgcatgttgaccgtcagcatccacttgcaccgcatggctgaaccctgcgtctgccgctgcctgcaagccacgcatcaccgctgcgcctttacctgcgttttctgccaggcgaattaaggtcacgccaggctgttcgctaaccagattatccagttgctgttgcgtggcggcatcgctgccgtcatccaccacaatacagggcagattaaatggcttaagacgcgccagcacgcccggcatcatcgcgccgtggttgtagcaggggatcaacacgcagggagaaaagtttaccgacataggcggatcttcccgctactggcggtgtggcgggcgtcaccgtcgtgacgctgatagcagaaagtgagtacctgacttgtttcctgccatgttaattgcagggtaacagtcgtctcaggtataagtggcgccagaaatttaacattctggatactacgaaaacgccagcccggagcaagcagcgtggtagcataatgcattacccagtccaactgggccacgcctggtaacagaggctgtacggcaaaatgaccattaaaccagtagagcatcgggtcaaggtatagaacgatttccatctcctgcggttgaaccagatggcgctcaatttcatggcgtatcatgaaataactcctgtaattgcgcatagacacgcttattcatattgtttactggtatttcatcaataatgcgccagtaacgaggtactgcaacaggttcaagccatggtaatagtgctttgcgccaggacaactccagagttttccctccggagcattgccatatttgacgggcctctttatttggtacaaccacgacaccgatagcctggcgaccattgcgtattaatggtattgcagcgacatccataataccgtcaagtgccagaagtcgttgttcgatttcaaccagtgatatccgcttctcctctatttttaccactcgaccacgtcgtccgatcaggtggaactgaccgttttcattgaattgcaacatatcgtcaagcaccaatccttcagcagggattagtggcgaaaagacacgaaccccctcactttcctgtgaaagatgaacatcagaaaaagtaaaccaggggatattatcctgttgacggtaacgccatgcgagaatacctgtttcggtactaccatagatttcatcgggccatatattcagccaggtggaagttttctctacatcctgccatggtagcataccgccggcagagagaatcatttccactgggggaggcgtcagatgaaggtcgagtcgcttaaggaacgccgggctgctgacaaaggcatagcggtaggtatggcttaatgcggcaagttgctcagaataccagagcattgcggcatgcaatggcaggccaagtgccatgggtaaaaaaatacggaaagtcagcccatacaggtgctgaggcatcacggatgctacaaaacgacagcccagtagtcggtctgcaaagtgagttgccagcatgtttgcttcttgatcaaggctgataagaggttttgcaatttgttttggttgtccggttgaacccgatgtgaaaagttcaataaacgcgtcagaagcaatatcatcaaaggctatcgtgctggtcgtcatctggtgagatgtgcttacaacaaactgtggaccgttccagcccagccttttatcactcaggacgcaatcaaacaaggagcgttgtacatttaacaaagcggcgcgattatggcccgggattaccgggattttacctgagtgtagcgtggccaacaacgctacaataaaaagatagctgttttcaaaacaaagtgcccagcgattgcctggctggtcgcgtaaatggtcgatcaaaagcgctacatcatgccgcagatgccccagtgtccaggtatattccccaagccaggcaacaggagttgttacagggcgagaggctgtcaaccactgtgaaagagagagagtctgattcatggtgttttccgtttgatcatcttacgacgtatcagccattcccctgcagtcaggaaacctatcagaaggtaagcaatgataccgttccaggctgtccacaagggcatgttgccatacaaggtggtaaataacgcaatactgccattgaaaataaaaaacaggcaccagacctgcgttacgcggcgggtatatcgcacggccttttccgggaggtctggctcctgcaaacgtgccagccgctcaactatcggcattgtcgaccgcagcgaaccgccaaaaaccgccagcatgactgcgttaaccactaccgggtaaaacagcagtaactggtacgttttcaacagaaaactggagacacacaatacaatgcccacaacagcaacgatttttgtgacgacctggagcggccccgtctggcgacggggctggcgcaggcgcaataaaagcaacagcgccatcagcggcaacagccagtgcaggctgttatgcaccaaacctagccagattaaaaaaggccagacgagcagcaataatccggtcagcaacttaatcatcggtagcgagcgaatgcccgacatcaaattagccttcttgtagcaggcgttctacagcctcgacaacatcctggactgtacgcactgctttaaactcttccggcttgattttcttaccggttttcttttgcaggtgcacaatcatgtcaacggcgtcgatgctgtccagttccagatcttcgtacagtcgcgcttcaggtttgatgtcctgcggatcgatttcaaacagcttaaccagcagggctgagacttcctgataaatggtttgttggtctgtcatgatggttttcctcaggcacgttgcgcagcaatgaaagaggccagagtggcgacggagaaaaagtgctgacgcatttcttcgctttccgcagagagcacgatgccgtactcattttttactgccagtcccagttccagtgcatcgatagagtccagccctaaaccgtcgccaaacagtggcgcattgatatcaatatcatcaggagtcaagtcgtccagattgagggtgctgatgatgaggtttttaatttccagataaagcgcttgcattatttattcctgatagaggtaaacaaccttgctgtaattgaagcaaaagatgccggtttaactgtcttgcagccagcgtcggctcttgtgaagttgcatcgtaaaatttattgatttctacccgcccatggacttcaaccgtaaaaaacggcctggcaggcgggacgtcataccacttactttgtttatccagcagatgctcgctacagccgatcgtcacgatgcgtaaatcgctggtgcagcgcacggcaatattcgctgcaccgcgctgtaacgtcattttttcaccgggcttcgttcgtgtgccttcggggaaaatcaggatagtgtcaccctgtgccagtcgctgttggcagcggggtaacagggtttctgcttcgctgttgattaaataatctgccgctcgcacgacgccgccaagaaaaggattttttaacagcgcgcttttcaccaggcagtcagtttctggcatgactgatgccagcagcacgtaatcgatcagcgtgggatgattggctacgacgaggcaaccgcgttcctgacgtaaaatttcagcgccatcaatacgataatccagcacgccaagccctttcgcgacagttaaaaacaggcgaaaactggcggcaatgctgcgacgtgccaaacgacggcggcgggaagtatcccacactaaaactaacaatatgttaaaccacacgactgaaagcagcaggccgccgagaccaaacaggacaaaacataacccggtcatgaccagtcgccatgcccatcccaggcgcgacatcagcttactcatctgcggctccagcgccattgcacgcgctcgccaggcagtgaaaaagcatctgcattttgtaaatagtgctgtaaaaacaacatgctttgcggcagtgttgtttcatttaccgcaatggcttgctgcgtttcacattgccagtcatcgccagcttcaatcaccagcgcgacggcgtacggccaggtaggcatttctgcgggcagttgcgggtgataaaactcaggtagaaagccatcaaaatcgaccatcaacacgcgctggtatcccgcttgtagcaggctaagcacttcacacaaaccttgctggaaactgtcgcgaccagccgaaagcgatgacgaaacgatcggctgtttggccacaatggtcaggttacccacggaagagttgtgtacggaaagcgcgaagtccgtcggagaaagcgcctgttcggttgccagtgcatgaacaatgcggtaattgcgctccagttcgccatgacgactggtatacaaaacagcgtctggctgatggcggcgtagcattgtcagaccgcattcaacagccagtttgctgcctgaactgagacgacgagcggtcatcattggcagttcacttaattttgccaacggcgcggcagggtcaatcgcccacggctggcgcgaccatgcttgccattgctgcacatcgctaagtccaggcgccagtgcctgccagttggtaatatttaatgcaaatttcatcaacgcgcgcccgcggtaaaccaaaattattaagtgacgattatttcttttggcatatcaaaagtgtatgcccaacgcctaaattattgtgacgctctgctacctggaatcctgctttattcagatagtcgtaaaatttctctgcactatagaaacggctgttaccgtttgccatgcaggtaaaataaagtgaggatgcattcaggctaaacgatgtcgcttcaaaccgctgtgcatcccagaacaactccatgatgcaaagttttgcgccaggcttcattacgctggcaattttgctgagtatgctaattatttgttcgggtgaaaaacagtctaaaaattggctcatccaccagatatcagcctcgcctggtaatggtgcatcgcttagcatatccaccgcatggaaatctatgcgatcagaaaaacctgcattcgcgatattttctttcgccagtacgatttgttgtggcagatctaataacgtaacggcgatgttttcattgaatttgcagcagcgcaaagcccacttacccgtattgccacccacatcgtacaaggttgtggggttgttggcgaatacataaggcagtgcggcgttaaatgcgccatctgaatagtaatgatcaaacgcaaaccagctatcacgtgcggcgtctggtaattgcgaaagtgccggatatatcgtcggccagtcgccaaatacttttaacccggaaggttttccttcattgagtgaatcggcaaggaagaagagcccctggtaacagacatcctgggtgaaatccatattcacgcgagtcatagtgtcatgcaggaggtaatgaccgattttcgccaggtaataaattccctctttacaggtaataattcgcccgcttaagcccatatccagtaacacacccacggcatattcattcaggactgtgtgctcagtaatcgcattaaggggagctccctgtttaccctgttgatccaaataatctaatattcctgcattgcgcaggcacaaagctgcctggaaaagcataggagcaaaggcaatccgctgtgcttcggtgatggcatccagtgcgctgagcgtgtcctgttcgtacatatataaccattcttatagagaaagttaaatactatcgggccattccagcccgatatcagcatcactataacgttgctcctgtagataagttaacctgtatatctttatccaggttacgcacccagcggttatagtttttatgaatttttccatcagaagcctgcagattcaggctactgtcatatttgatgttatagtaggtagctgtatatgtaatacgaacctctgcaacgtgatttcgtgtttgatagcgagctttaataactccaggggacacttgcgtcataatccacttgcgctgcgcacctgctttcaaaatggcatttttaacctgctcctgagtatgacccacactgacagtggtgcttatctgttgcactggggccgtacggacacaggcactcaacatactgataaaaattgtgatggcaaaccattttatataacgtttcattagtgcctcttatgtatgcaatacaattatataattaaatagtaataacagacagtatatctgtataaatcccagacttcttacccgaaatatatttggggttatattggattgtcaatgtctggttgtgacagggaccaaagatatgccggtatcatttttgtaaatggcttgtgaggtggagagccctctgcggtaagctccctcgacattccttttttatttatccgcacatattcttattctgatattgataaaacacggggtatggattgagactgaacagcttgttgtgcccggttttaatggtaaatgcatatgtgtcccagaattgatattgacttcctggtactcaatattctgaaaagctgaagaaagatcacgtttttgacatttttttgatgtcttgtcataaaactgtttcatgacagactttttcaggtgtaaattttctcgctgacactttttgacatgaatttacactggcatcacacaggccagaatacggggagaacatgcagcgccggcagaacaacattctgacgaaaacgtcccttttatcccgtgcgttgtctgtcccctgttgtgatatgttccggcgcggctctccgtggatatgctatctctccctctccgttttttctggtttttttatccccgcattttcgtctccggcagccatgctgtctccgggtggccggtaccctgctgaacagtgcgctgatttatgcggggaataacctgaagctgtttacagaccgtctgcataaccagcatggtgatatcctggccgacaacagtctgtgggtacagaaggacagcagcgggacggcaaacagcgaaatcattaaccgttccggtaatattgaaaccatgcgtggcgatatcaccatgaatacggcgcatctgctgaattcatgggatgccatttcggccagccatgaggtcattccgggcagcagccgcggggtgatttcaccggttccggaaaataaccggtggtggggtgttgtccggcatgatggtgtggaatatctggccgtgtactggggtaagggtgccacggtacctgatgaataccgtatccgtacgggagatacggatacggtgacagtcagtgccaccggccatgctgccaggatatccggcggcgctgatatgcatatccgtgcaggacgactggataatgaggcatcgtttattctcgccggtggcagtatgaccctgagtggcgacacactgaacaatcagggctggcaggaggggaccaccggaaaggaaacggtctggcggcttgcctccgactcactccccaaagcgtggtttactgagccatggtacagggtctatcgccaggtctcgccggatgcgacagaagccagtggcacctctccggtaggtcagtaccgtgcggttatcagcgctgccggtgatgtgtctgccagctttgccactgacaccggtaataccactgtcatgccccgggcaggtggttcaggtaacacgataacggtgccttcgctgaactccctgacaccaccgacggtcagtcagggggtgagcggtgaagccctgctgaatgaaagcggtaccgggataaccggccctgtatggaatgacgcgctgccggatacgctgaaggatatcccgggtgcgctgtcgctgtacggggcaagtgtaagcagctatcccctgccatccggtaacaatggttattttgtcccgtccacggacccggacagtccgtatctgattacggtgaacccgaaactggatggtctcggaaaggtggacagcagtctgtttgccggactttatgacctgctcaggatgcaacccggagaggcaccacgtgaaacagacccggtgtatatcgatgaaaaacagtttctgggctcatcgtacattcttgaccgtcttggcctgaaaccggaaaaagattaccgctttctgggggatgcggcttttgatacccggtatgtcagtaacgtcatactgaaccagacgggctcacgttatatcaacggcacaggctctgacctgacgcagatgaaatacctgatggacagcgcggcagcacaacagaaagcgctcggactgacctttggtgtgtcgctgaccgccgggcaggttgcacaactgaccagaagcatactgtggtgggagtccgtcaccatcaacggacagacagtcatggttccgaaactgtatctgtctccggaagatatcacccttcataatggcagcgttatcagcgggaacaacgtgcagcttgcgggtggcaatattaccaacagcggcggcagcatcaacgcacagaatgacctcctgctcgacagcacaggtagtatcgacaacctgaatgccggactgataaacgccggtggtgcactgaacctgaaggccatcggggatatcagcaatatcagctcagtcatcagcggtaaaaccgtatccctggaaagcgccaccggaaacatcagtaacctaacccggacagaacagtgggcgatgaacaacggatataaccatttcagcggaacggataccggtccgctggctgctgtcagggcaacggactcactgtttatgggcgcagccggggatatcagtatcaccggtgccgccgtttctgccggtgacagcgtgttactgtccgccggtaatgacctgaacatgaacgcgatacaggccggagaacgtcgtcgctatggcgggtccgggtggtatgaaactcatgccgtggcccccacggtcactgccgggaacagtctgatgctttccgccggtcgtgatgtgaacagccaggctgccggtattacggctgaaaacagtatggatatccgcgccggacgggatgtgaacatggctgcggagtccacaggcgcaggtgaccacgacagcactttcagcatgaagacggttcatgattcggtccggcagcagggaacagacatgaccagtggcggtgacatcacggttactgccggacgggatatcacctcagttgcgactgctgtaacggcaaagggcgatatccgtgtgaatgccggtcatgacatcgtactgggtactgccacggaaagtgattatcactacagtgaatcaggggaaacccgcaaccgtctcctcagccatcagaccacccggaccatcacggaagacagcgtcacccgtgagaagggctctctgctgtcggggaatcgcgtgaccgttaacgccggcgataacctgacggtagagggttcggatgtggtggctgagccgggatgtgtcactggcggcgggtaatcatgttgatgttcttgctgccaccagtacagatacgtcctggcgctttaaggaaacgaagaaatccggtctgacgggtaccggcggtattggtttcaccattggcagcagtaagacatcgcacgaccgccgcgaagccgggacaacgcagagtcagagtgccagtaccatcggctccactgccggtaatgtcagtattaccgcgggcaaacaggctcatatcagcggttcggatgtgattgcgaaccgggatatcagcattaccggtgacagtgtggtggttgacccggggcatgaccgtcgtactgtggacgaaaaatttgagcagaagaaaagcgggctgacggttgccctttccggcacggtgggcagtgccatcaataatgcggttaccagtgcacaggagacgaaggagagcagtgacagccgtctgaaagccctgcaggccacaaagacagcgctgtctggtgtgcaggccggacaggctgcgacaatggcctccgcaaccggtgacccgaatgcgatgggagtcagcctgtcgctcaccacccagaaatcgaaatcacaacaacattctgaaagtgacacagtatccggcagtacgctgaatgccgggaataatctgtctgttgtcgcaaccggtaaaaacaggggcgataaccgcggagatattgtgattgccggaagccagcttaaggccggtggtaacacaagcctggatgccgcgaatgatattctgttgagtggcgccgcaaacacacaaaaaacaacgggcaggaacagcagcagtggcggtggcgtgggtgtcagtatcggtgccggtggtaacggtgccggtatcagcgtctttgccggcgttaatgcggcaaaaggcagcgagaaaggtaacggtactgagtggactgaaaccacaacagacagcggtaaaaccgtcaccatcaacagtggtcgggatacggtactgaacggtgctcaggtcaacggcaacaggattatcgccgatgtgggccacgacctgctgataagcagccagcaggacaccagtaagtacgacagtaaacagaccagcgtggctgccggcggcagttttacctttggctccatgaccggctcaggttacatcgctgcctcccgggataagatgaagagccgctttgactccgttgctgaacaaaccggaatgtttgccggtgatggtggcttcgacattacagtgggcagacatacccaactggatggtgcggtgattgcctccactgccacaccggataaaaaccacctggataccggaacgctggggttcagtgaccttcacaacgaagcggattataaagtcagtcacagtggaatcagtctgagcggtggtggcagcttcggggataaatttcagggtaacatgccgggtggcatgatatccgccggaggtcacagcggacatgcggaaggaacgactcaggccgcagtggcagaggcacatcaccatccgggacagggacaatcagaagcagaatctggcgaacctgagccgtgaccctgcgcacgctaatgacagtatcagcccgatatttgacaaggagaagagcagaggcgtctgcagacagtggggcttatcagtgacataggcagtcaggtggcggatattgcgcgtacacagggagaactgaatgcgttgaaggccgcgaaggaagcaaccgcgaaacacttcctgctaatgcaacagagaaacaacgcaggaatatcttgcgaaactgcgtgacacgcaggcttacaggaatgaaatggcgaagtatggtaccggcagtgaaattcagcggggtatccaggccgcgacagcggcgcttcaggggctggcggggggtaatttagcaggtgctctggccggagcttcagcaccggaactggcacatctgctgaaatcaacagaaaaagacccggcagtaaacgccattgctcacgccattctgggcggcgcagtggcggcaatgcagggtaataatgtcgctgccggtgcagcaggcgcagcaacgggagagctggcagccagagcgattaccggaatgctgtatcctggcgtgaagcagtcagacctcagtgaagagcagaagcagacgataagtacgctggcaacgtgtcagcagggctggccgcggtctaccggaaacagcaccgcatcagcagcagtgggagcacaagcgggaagaatgctgttgagaataactcactcagtgctggctggaacaatatcctgccatcaggaacacaggattacggacaggccgtagcctcgtggaatcagtatgctcaggacaataatctgacaccggagcaggttcaagaagggatgaatcgtatagctattggtgaagggccttcttgggggacaacatataaagtacacccggtagttcaggctggcggtgatgttagctttatccggggttatactttaagcggaactatagatgacaatcatatttcagttaatcaaggggatatttatagtataggtgctcatggcggagcctcgatcggattatcctttggcccgtatttcccgggattaataaattcaaatgataacgattattcgataaatggtggttttggcgttggtgcagtggggctttctacgggtaaagatggtgttagtttcacttttggttttggcccaagttggggttggagtgcaactgaaattaaaggcgttgacgttaatggcacttcaacaagtgaggtttatcgatatgattttaaataatttctatagtttactatttttattgatgcttgcgctgtcaatattttccttcacagtgctatttgctttgtttatatataaagatctcggtggtgtaaaatttgcccgggactcttttttgttttttgattatatattttttagttctgacatgagagcaaatgcctctgcactatcggttatctgtgtttttatatttggattggcttttgatcataatcgtaatccacttgttaagaattacttgatcgatatagtatggtttttaggtgttgttttattttttatacactgtcgttttttttctaatctggaatatggtaagacaaaaattatttttgtaagagagctttttttcaacctaaaaataaaactaaggttaatatttttatggttgtcacgattattattcatcatattgatattaaatcgtttttatcgttgatttgttgttgagaataatttacttggcggtagtgaatatgctcattctgcgtggatacgccagcatggtatcgacatggcgacatgtacagaaaactcttccggtgccgcctgccagaaagcaatgaatgagagggatgctgtagggctggctctggcaacaggtactgtggcactactccccggtagtgctcaggctatgtggggacttggagcaagtgcgaatgctggtatcagttatctggctgatggtactgtagatccggcaaacgcagccattgcaggctgggtgaatgtgttcagcatgggtaatggcctggcggggactgtgggctggaatgctgcaggtggtgcgctgggtaactggatcggcaacaaagatcctctgtctggtgcaatttcaaatggtatcggttctgctgccgggtatggtatcggtaaaggtattacttaggggacagataagattacgaatgctgtaggaaaatgggtgacaaatggctgggatcctaagtacgatccaacatggataaaatatgctgaagtaaatcgtaacgatatcattcgagcaaggcatgaaaccgagcaatattcctggaactgctggagatattggcggttctataggatccgagctaggtggaaaagtaacagataaagtatctgaggaactcaagaaatgaaatattcttttcgagtggtaataggtaagtttattatatgcagttcaattctcttattgtgttttattggcatgatcttagcggccataataactaaactaacgtttgtagcgttagcatggtttcaaagcgggatttttgaagttttgtggagcgatattgtttatgctgctcagttgggtggtctgggggggggggcatattaggtttttgttgggttttgttatatctttttagggcaaagggctttagttgagaataactacctgagcgtgtctgaaaagacagaacttgagatagcaaaacagacgcttaaaaacagtaaagatccggcagaacagtgaaaaggtacagcagaaatatgatgcattgcttgaaaaagatattgccagtgataaggaggttattgctgcctgcagtaatggtaatgcggggagttcagcgtgtgctagcgcaaggctgaaagttattgcgtcgaaagaagggtacgaagatggcccttataagagactgtaattaaaattgtgtaattgcctgtttttgatatgttcactccaacaacggagacaggcaaacgatggacgaaaagaaacttaaagcccttgcggctgactggccaaaggccttaaaaccgaagccgacctcaaccagttttcacgcatgttgacaaagcttaccgtcgaaacggcgctcaatgcagaactgactgaccatctcggtcatgagaaaaatgctcctaaatcaggctctaatacccgtaatggctactcgtcaaaaacggtattgtgcgatgatggcgagatcgaacttaacacgccgcgtgaccgtgaaaataccttcgaaccgcaactaattaagaagcatcagacacgcatcacccagatggacagccagattttgtccctgtatgccaaaggcatgactacgcgggaaatcgttgccacgttcaaagaaatgtacgacgccgatgtctcgcccacgctgatatccaaagtgaccgatgcggttaaagagcaggtctctgaatggcaaaatcgaccgttggatgcactgtatcccattgtttatcttgactgtattgtggttaaggttcgtcacggcgggagtgtcattaacaaagcggtgttcctcgcgctgggcatcaataccgacggtcagaaagagctgctgggtatgtggctggcagaaaatgaaggtgcaaagttctggctgggtgtactgactgagctgaaaaatcgtggccttcaggacatcctgattgcctgcgtggacggcctgaaaggcttcccggaagcgataaatagcgtgtacccgcagacgcatattcagctctgcatcatccatatggtgcgcaacagcctgaaattcgtgtcgtggaaggattacaaagccgtcaccagcgggctgaaagcggtatatcaggccccgacagaggaagcggcgttgatggcgttggataagtttgcaggcgtctgggatgaaaaatacccgcaaatcagcaagagctggcgcacacactgggaaaatctcaacaccttcttcggttacccaccggatatccgcaaggccatctacacgacgaatgccatcgaatcgctgaacagcgtcattcggcaggcgataaagaagcgcaaggtgttcccaacggacgactcggtgcgaaaagtgatttatctggcgatacagtcggcgtcaaaaaaatggagtatgccaatccagaactggcggctggcaatgagccgttttattatcgagtttggtgaccgccttagcgagcacctttaatacggcggcagttacacagaattatttacagggtcgactgggaacatattcaggcagtgtatctgaatccagaaaagaaacagcataatgtaattttattacaaaaggcgacaattagcttgaaaaacgccgttattgggtgttctactaccatgaaaatacgcatttttcacaccgcacattacgaaactcgcatcacggagaatgaaagctatcagacactggttgctatttttgaccacagaaggtagtgctgtttaccgccagagctgtgctggcggggagcgaatccgaaccatgtcgataattgtcaccggccagagaactatgtggcatcaattttgctgaaaaatactgcagcaatcagaggactgacgcccgggatttttaaacaaattcagttttcatcgtagtatcactttatcagccaagtcataaagttcagctgtattttgggaggtaaagcgatattatgattatattttatgtttgatagaaatatttcagggcagatacaataccatgggtataattcagttttttcagacacaaacaaaaataactattggatacattatttctgtcacagctttcttgttttgagtaaccataaaccaaatattctctaagagccactattgttttttcacttctgattggtgatatttcaatcagaagcgaaaagtgctcatcatttacacttgctcgttgtaatcctgaattatatgttttttttgcataagaagaataacgcatatacacactcaccaacttgtatttataaaatcattttgtaattcattatgtaatgaaatcaccttactccccttcaagttataagacatgaaagaataatttttttgcaatgtaagtttttacaaaacatgaataatatattcatggctcatacagaactaccataagaaggatgattaagaaaatactgttttatattttaagaatctctgagaaaggctgccttccggcagcctttcccccacatcagaacatataccggaaatttgcgtttaccgcattatccacgttatatttaccaaaggctgacttctcaaactccagaccaaagcgcatattgtcctttatctgcgcattcataccaacattaaacagcatccggctgtctttctcgccttttatccgtttctccccggacgcatcacgcagtaccgtctcaccattattcagtaggtcaaactgccagctggtcccggcacgggccgtcacactccagtccttaccactgaaggtcttgcccagttcaatccctgttcttccaatcagcggactgaagtccctgttcttcatgctcaggtccatatcaccgtctttccagcggaatgttttcccggacacggcgccgtaaaccagttcagcctgcggctcaatgaacgtttcctctgtcaggtgatagcggtaacccgtttcagcaccggcataccaggaatgggtgttgtagtgtttcgttcccagaccggcaaagttacctgtgtaatcattgtcatggtgaatatatttaccaatcaaatcgatataggcaccggactcaaacaatgctgaagcatacagaccgccccccaccgatttcgtcttgccgctgaacgcatggctgtctgcactgctgtcggtataggtcatcgtgacaccggtaaacaggtccactccgtccagttcatgttttttgtcaaagccgacctgaacatgggtgtaattatcactgtaaccaccgtctgcagaaccggcaccactcatgatgcgcgcccaggctccggcatcaccgtttgtgtcacgcaggtcacccatacgtttgttcagattgttgacttccgtcatgaagtttttatacccggcattcatgaaactgtcagccttcgcggcagcggctttatcagcctccgctttaaaaccgtccagtatccacttcgtattgccaccactggtgtcaacatgcagggttggagtcacccgactgaaacctatcatccgggtgccggccttaaacatctctgctgaagttcccgccggtgccgtgaccagaggaatattcagggactgtccctgagccggatccttcataaagctgacgttcaggctgttatctgaacccgtggctttttcagtcacattaattttatcggcatttttcaggtccgtacgcagaacaaaatcactgcctgttgcatccagtttattcaccgtcagggtacggaaagtacggtctccttcagaactgatacggctgtttctgacggtaagagtgtggatggcggagtccccacccagagtccacagtgcattatgcatactgacatcagccctgccaccggttatggcaccattgaatgctgcgttatagccctcaagaagactgccggcaaacgccgatgcagtcgtttccgcagaagccagttctgccggcgtgtcagacccgatggtaactgttgatgccgcagaggcatgaatatcaccggaagcatgtgctccacgggtaatttccagtgttgcgttatcgccggtcaggtcatatccgtccgtcagatatacagcaggggcatactggttagccgtatctttaaccggtgtaccgctcagggtgattttgctgttcttaccggcctgaatatgcccgtcgctgaaaagaccgttcagtgctgtaagatgaccgccatcatgcactgtcagtgaactgccggcaaaagcacccggggctgttaacaggacgtccggagaggtgatactgacggcactgtcataagcttcaatccctccggtgaaccggctgccgatatccagggttgagttatggtccagcgtaatattcccttcatactggctcctgtcattcacggtgtccgggacagaggtaccttcctccagaatgacataatttcctgttccgtcatttttatccacaaataccctgtcacttcccagtgtgatatggctgttatccgacttaatgtcactgttcagcgaggcgttacgtgaaagatggaagtcagcatctttcagcgacagtgttttcattatgaactggcggttttcccagtctttctggttcaggctgaccggcgcactgccactgacggaggcgtggataaccggatgcccctggaatatcagggtgccactgtcctcactcagggtaccttccggcaggttcacgctaccatcaaggatgacctttcttccccccggcagctgtggaatggtgacatccatattcccggtcagctgaccatgaaagataacgggttgttttgcccgcccggccaggatccggtcttttactgtctgaactgctttgtttttgtccgtgccaacaaattcccactgagccgggtcattcaggctgttcccccacagggtgttaccatagctggcagatttcagaatatagaagcgggtctggccgttgagtatcatgctgtataggtttcccggtgtgccggtaccgccaaagggggatatactgccaatcggaacactgacatttgtatcctgagccttaagatccagtaaaagccgggatttttgctgtgcattatttgtaatcaccgccccgtaatcggcagcctgcagtcgggtgaaggtaacggcattaccattaaggtcaagcttacctccccggtatccccatgaaatgttatccggattgacctgacgggcatctccgagcaccacggtcggtcgtccgctggcgaggttcacggaactgaaggcctgaacattacctgcagtgtctgcctgctggttaagtacaacggtaccgtctcccgttttcagtcctcccgggtttacacctgttccgtttatggtcagggttccttcccccaatttatgcaggttgtcaccggcaaccccgttgaccttccaggtcacattcgtccccttgtcagtaataatgccggcacccgtccaggtttttccggattcagcagatacggtgtaactgtctttaaattcgagataaccggccccctgagtcacactgtctttcaggacaattgcaccgttctgcccgctgaataccagatttttaccggcattgagatcattgtctttctgcccgtgcatggtccagtttttactgccctggctcagggtgcctgtgcctgatgttttgtcgtatgtccagttcagggggggcagtccggaaacaaagtccacgggggcatcgaaatcgtcctgcataacctggttcagataatctgttggtatgacattccaccagttcgtagcaccattaatacctgcatatgctcttaatacagcaacaataacccattttttttgttgttcatcataagcaaacaaaggagaaccactgtccccaggggcaccatagtcaggtaaaggtccgtttacaggattataggtttgcccgggattagagactattgttgcatcagatatcagaggaactcctgtggttcctcctgttttaaaagcatatccgccggcaaccttaactaaatttccgtccttgtccttagtgtactgcgtaccactacccacccgataaaaagcggtgtaacgttcagtgtctttataagcattggctttggttccttctgatgttatcgctgagggaataacttctgtaaccagtttattcagacgtggagcatggaagtcaacagaagagtggttattacggtcaacaagggaatatgtatttttcccattaccaaagctcacactctgatatcctccgttatgctttacgctgacgatatactgaggtgatacaagcgtagcaacgccatttgagctcacactgctgaaatcggccattggggctttatccagtctccccacaagttttccgtccttatcatataccggaatatctgtggcaccaggtacaaaaagccctttgttttcagcgaaatcacgataaatctgataggcaatatcggaacggacaatgcccgcctgggatatctgagggtaatacagatagactgctggaatgccagccagaagaatatgcgttaatcttcggcatgtcttttttattaccctgctggcaagttcagagacaacaataagtcccccggtgacagggcaatatttaagagaataaactttattcactgcggactctccatgatgtttaagtactaatgataaccagacgttatcacccgggcggaaaatatagtgactgcattaatgtatttttgtgatgtctgttacatagtgaaatacttttcgtttgcttacaaaattaccgctcctgcaatttttttcacatatgcggtattgtttttatatgtttttattactgccaccattaattatactcgtgatttttacttataaaaaataaacataacccatctaattttataacattgttaccctgggtatttacttaagagtattaccagagggtgattttatccggatatgacaagtataggttgcctcattcagtattcataaattatgtttaccacggagtacccgacttcctcatcgattgtcctcggatgactatttttattgtaaatgtaattgagatactacagcattttgtttaaatgccattctgttcataatcacttgtgcgatgtgcataacaccttaagtttttaacgactttctcgctgaaatactattttaaaacttcattttatgtctatatcttttaatggggtaatgttaaataaaaatttatttttttattggtgataaagaatgaaaatgcatgcaacaaccggcttttattgtcattgtcatttgtaagattcaaaaaaatcggacatttcttataatttcccagtgataataataagaaataataaatattttattattgttaccttcttttgttgtgatgagcatcacaatttattcctgaatcaattcattatgtatttgaattagttaaaacgtgcgcttaacgcgcaagctttccgtttccaagactgcctgggtatggtgaatcaggtctaacggcgcttgcaaggccaacaatcaacgaattaagcgccagacgtatggtcaaaagtagtggagtagaaaagggggaattatttgttggagtgcaaattcgccagctggtactccctttccctctggaagctcccttgtgcgtacctctccgcctttctcccttcgggaagcgtagcgctttctcattgaaccgccccgggtttcctggagagtgttttatctgtgaactcaggctgccagatcatcgtttccgatggaagcataataagctttttctgcttctgccggaggagtatggcccagcctttccagcaatcgtcgattgttataccagtccacccacgtgagtgtggccagttccacttctgcacggtttttccagctcttacggtgtattacctccgctttgtaaagaccattgatgctctccgccatcgcgttgtcatacgagtcgcctgtacttcctgttgatgcagtaatccggcttccttaagccgctgtgtgtaggccagcgatacatactgagaacctttatcactgtgatggaccgtgccggacggtcgacgggcccataacgcctgctccagtgcatccagcacgaatgtcgtttccatggacgatgagacccgccaccccacgatgtatccggcaaacacatcaatgatgaacgccacatagacgaagccctgccatgtgctgacgtaagtaaaatcagccacccacagctggtcaggtcgttctgccacgaactgacggtttacgcggtcgcctgcggcaacggctttccggctgatggtcgtacggacctttttaccccggagaacaccggcaagtcccataaccgccatgagacgtgccacagtgcatctggccactctgataccttcccgtaacaactgacgccagactttacgcacaccgtataccttgtgattttcatcgtatacgcgctgtatctctttcttcagccagtcatcgcgctgcgcacgggcactgcgtttatccggatgatgtcgctgttgctgacagtggtaatacgttgacggggcaatatgcagttcgctgcatagcggtccgaccccgtactgctcacgcagcttatccagcagtggcatcattttttccagaggcggtcaaactccgccttcgcaaaataagcggaagcctggcgaaggatatcgttactgcggcgcagttcacgattttcacgctccagctctttcagacgctgacgttcagcggtggtgagccctccatcaccgcccccggtatcccgctcatgctggcgaacccagacacgcagagtctccggcgtacagccaatctttggagcaatggaacaaattgtcgcccattgtgagtcatattcgctctgactttccagaaccatacggactgcccgttgacggacttcgggggaaaaacgagtatttttagtcatcctgtttacctctttctcaggaagtttagtctccaggattcccggggcggttcacatagctcacgctgttggtatctcattttggtacaggtcgttcgctgcaagctgggctgtgtgcacgctccgttcgcaagcttgcctgctggttatacctgatgatgaaattattctgactcagaatgtgttatctttgttacagaaatattgctctcattaataagcagcggtgtccagctaatcactagaactttgcggtattactctgtttcctgcgtggtcctagatttgttccggataaaaacaattctcctctctgtggagttgtatccaggatgagatatacgtctccgtcctgaaaaagcaagtaattaatcaaaaatgtattttggttccatacatatagtatgtaatatcattcagacgcttacttaacttatttttagcatgcggtatactctaccgcgataatgcaaccgtacaatattgtgattgtgcgcttcccaaacgctgctctgtgactatctcatcattatttgtcaacgacggatgaaaagtagctcttccgcaacctgggtggaagaaaatggatgaaactttctggtgaacaaggatctaagctgttttcagttatgggcaacgcaatgcactctcttaagacacttctacagttaccttgcggatggtaatgcagtcgacaaattattagatctgacggtataaccctccatctccgcggaaaacgcaaaacagcgcaatgtcctgaatgctttaagcgtagcgattctgttcatagttgtccccggcgccggatacagcatctaccctgcacaggccagacgctatggcttgtattttccgtccgccactggtactgccgtaacccggcttgttcacgtaaaatttttgccgggtcgcttgctcccttagccagttcacaccagcagtcttcacagtcgttacaaaatttacagcgtcagatgggattaatagccggaggtgaggctggaaaacgggcagcaacgacagtgggtctccgttgcagtgcagatactcttcttcgcaggcttataataccctggagacgaaactgtcaggctcgccccatgtcggtattgatgagtggcgtggcatcggggccactgctgcggtatgttaatagtcaatcttgatactcaccgtcccctcgtcctgttgcacggtcgcgatcagcatacgctggcgacctggttcagaaaatatccggaaatacaggttgtctcgcgtgatcgctgcggaatcaatgcgacagcagcacgtgaaggtgcacctcaggccagacaggtagctgaacgatggcttctgctaaacaatattggcgatgcgcctgaacgaatgatgtacagacatatgactctgatacgtcttgttaccagttagttgtcaccaaaggaataacccggggcaaaaccatctgtgcctgcagtatcgctccgtcgtccggaacgccttaaacagcaaacccgcaaaaaacggcatcagctttggacagaggttatggccctgcataacaagggatgtagtttcagggaaatatcccgtattacaggcctgtcgcgtgtgacagtcagtcgcagggggcgttcaggaacattccctgaaatgtcaacccggcctccaaagcgagggcttctggacccatggagggagtggttaaaagagcaacgagaaagtggtaattataacgccagcaggatatggcgggaaatggtggccaggggggtacaggcagtgaaaccatcgtcagggatgctgttgccaaatcgcgtaaaggctggatcccaccggttactactgccgtcagacttccttcagacttccttcagtgtcccgggtaagccactggttaataatcaggggtgaagaaaattatgcttcccgatttattagtctgatgtgtgaaaaagaaccggagctgaaaatagcgcagcaactggtactcgagttctaccgtattctgaaaacccaaaataaatcacagctaagcagcttgttcactcgagtccacgaaagcggctcagcagaacttcggtgcgtggctgcggggatggaagctgatgctgcggctatatgtgaggcaatcagcagtcgctggagtaatggtgttgtcgaaggtcatgtaaatcgcctgaagatgttgaaacgccagatgtatggtcgagccggatttgaactactcaaacagagggtaatgagtccactggcatgagaatctccacccaggttgcagaagagccacttttccagttctgcatcagtaagtggaggtgttttttgagattttgtcatgtctttgctccggcctggttttatgttcagaagaccttcttcacccagtgccggataacggattcatttgagatattaaaccgtgcagcggcctcgcgcgtggtaagttcttcactcagagacttcaggacaaccgtcagtcgaaactcaggagtgtggaggtcatttttccatgtgatacgatcaatatcgtggagttaccagtctcttaccttacccagcagatgttttttcaacaccaaaacgtttagcgatacgacgtgcgccatcgtgtctggaaagataatgattaactacaaccaatctggtttcgagagaatattttggctttgccataaaaattgcacattaatcagttgggtctccaagttttggggtgcagtccacgtacaataaatttttatatccaccccccctttaatcactaccgccttggtcgctacatgatggataacaataatatctataatatagatattatctgcatataaaaattgatttttaccaaaaaaatgcccatttgttttattttataaataattttttgttttgagatttcactttttttagataaaaaccctacagagaagtaattttttagatgtaatctctagtattattggttttattggttttaaatttcatttaatggttttttgattgagggcaaaaaaaatttgatgcaaacaaatatgtatttataatgtgaatcaataataaattaaacattgaataatgtgtaatggtatggcagatcatatacagcggaatacgctaactcattatcgatttaatgtaaaaccagctataaataacatttcaaatgaacacttctggttactaatagaattatctggaattcgaagtgataagatcattatgtcattaagagagcacttagtagatggttttacaaaacgagaagtatgtgaaagaaacgatgtttcactgagttatttttctattagcttaaagaaaatatctcatatacataatgtctgcgcattgctaagtgaatattataataatagtttttagtgcaaaagcacggacaatcacgttattaatattttaaataaaaatcataaaaatgaagcgtaaacatttgttattattattgttgttttcattttccactaacagtgcgcctctttactccttaattagggaggcagttatgcacgatcccatagtaatggaagcccgggcggagttaacttcggcacaatcccgcatagagcaggcaagctctgcacattggccagttgtcacagctacaggaagtaaactcctttcacaaagtcaccgttattcctacgattatgacactgaagatattttacccggtattcgtggtgaagtgaatatatttgcttcaggggctattgaggcggatgtgcgtcggagtgagtcagaagccgaatattatcattataaaatggaagaaacaaaagaggaaacaattcactcttttgtttcattatatcttgatgcactcagggaaaaacaatccattgcggtacttgaacagagcctttcccggcataacgcaattcttaatgacctgaataccatcagtattcatgataccgggcgggagtctgagcttgttcaggccgaagccagaaggttgatggttcggcagcagataaattctaggagcagagtacttaaaaccacgctgggaaaactgtccacttggacaaaaaatccggtaaccgaagctgatcttgaaaatcctttttctaggatgacagaggccaaattattaactgattttacacaggctccacagaaaggtaacccgtcgtggcttgccagccaagctgatgttgagagtaaaaaagcggcactgaaagcacaggagcttgcccggtaccctcgggtggatttaacggggtctgtaacccgggatgaccagcagataggggtcaatctgtcttgggacctctttaaccgtaatgccagttatggtgttacagaaaaagctgcgcaaatagtggcagctaccggacgactggactctgtcgcccgaatgattgatgaaaccgggcgattatctctgataacagtcagacaaagtcgaggggaaatggaaacgctcagacgtcaggaacaggcttcagccagagttgtggacttttatcgtcttcagtttcaggtggcaagaaaaacactgattgaattactgaatgctgaaaacgaactgtacagtgtcggactctcccgggttcagacggaggatcagatgctccacggtatgctggattatctgtattcccagggaatgctcctgaaatggagcggagtgaatctttctggtgaagaagaaaaataacggggttgaagggttggtaattaagtgaagagtatttttgaaggattatcacagataacggcgttactgggtacacctgtatctgctgagactctggctgccggtactgtccgtacagatgtatccgggattgattttcgttctgttggcgagtttcttcgtagtgaaggatttgataatcatctttcccggcgatctccggaagatatcccgtcacttgcggttccggcgcttcttttattgaacgctcaggaagctattgtggtagtgcgtattgagggggccggtctggcaagacagtatcatgtgcttcagcctggaggtctccgtaagacactttctcacgatgcattaatggccgtttattctggttattgttggtttgttcagccacaggcaaagcaggatcgtcgctcggagctgccagagtatgacatgagcggggcatggttctggcgggtactgtggcgattcagggcatattacggacaggttattgttgcgagttttatcattaactttcttgctctggtcagttccctgtatgtaatgaacgtctatgaccgggttatacctaatcgttcctgggaaacgttatggatgctgagtatcggggtgattacagcaattctgtttgagtgtgctgcaaagttaatccggagttatctgacggatgttgcgggtaagaaggcagacctgattatcagctctgctctgctacgtcgggtgatggcggtaaaaatgtctgacaggccggcatcctctggttcatacgccagcaatttgcgggaatatgagtctgtcagggagtttatgaccagcgctacgttactggcttttgttgatctgccttttattctgcttttcatcagtgttatcgggctcgtgggaggctggcttgcggttgtacctcttacgctggtcccgctggttattctggcaggaatattactgcagcgaccgctttcccgtcatattaatgcctccatgcgggaatcatcgcagcgtcagggattacttgtggaggctctggacggaatagaaaccctgaagctgaataatgctgttaactgggttcagcgacgctgggatggatatactgcaagtgtcgcccgttcgtccattcgggtaaaaaataccagtaatgtcataatcagcttttccacagcaattcagcaaattaatactgttctgctggtcattctgggaacgtaccttattcacagtgatgacccacataaccgtatcaccatgggggcactgattgcagccgttattctttccggccgcgcgcttgcaccgcttggccagatagcatcactggccacccgtttccagcaggcccgtctggctatgcagggggtgaatgaaatagttcgccgcccggtggaacgggaaagtcagacacattatctgaccgtgaaggatatccagggggaattccatttcagcgcagtcacgtttttctataagcctgaattacctgcagccttgaaaggtatgtctgtctgtatccggcccggagaaaaggtgggcattattggcactatcggatgtggtaaatcgacgctactgaaaatgatggtagggctataccgtcaaaataaaggacaaattacccttgacggggttgctatgcagcaactggatccctgttttgttcgggataaggttttcctgcttgagcagaatccccggctttttctgggaactctgcgtgaaaatctgcagctttcgcgtcttccgggaagcctgtcggatgtggatatgattaatgcagccggacgtttcgggtttgaccgttttattcgtcatcacccatgcgggcttgatatgcagataggggaaggaggtcaggggctgtcaggaggacagcgtcagatggtcgctctgacgagaatggtactgggttctccccgggtagttctgcttgatgaacccacgacgggtcttgatctgcagacagagaacattgttctgaaagggctgaatcactggagccgtggacgcacaatggtggtggtgacgcatcgtctgcaggtgctgaatattgttgaccgtattatcgtgatgaatgaaggccgggtaatgatggatggtccccgcgatgaaatactgaaaaaactgtcagggaaacagcagagtggggagagcagagcgataacttcatgagcgtcaagcggataagaaataaagagcatatatgtttaacagtttgtggaccgcaggggtatgacagaaaaaacggaacggaataaagcgtcgtcagaggtggttaggcagtcagacctggccctgttgacagatgtacaggcagcccttcagcaggaaaagcatcatgcccttttcctgatggtgatttttctgctggtactggtagtgacgtttgttatctgggcatggaacagtcctctggatgaagtgacccgtggtcaggggagtattattcccggcagcagggagcaggttatacagacccttgacccgggtattttgaaaacacttgaggtcagggaaggagatattgttgagaaaggtcaggtactgctgacactggatgatacccgaagctctgccatgctgagggaaagtgaagcccgggtgaataacctggaagcagtcagggcaagactccgtgcagaagcttattccgaatcactgacatttccggatgacgtgcctgcagatttgagggagagggaaagtactgtttatcgactacgaaagactgaactggcacaaagcatcgccggccttaagcagagtaaggctctgctggataaggaaatagcaatgacccggccaattgtgcgtgaaggggcgatgtcggaagtcgaactgttacgtatgcagcgtcagtcagcggagctgcagttacagatggatgagaaacagaataaatacctgacggaagctggagctgaactagtgaagacagaagcagagcttgcacaggcaaaagagaatatggctggcagagccgacccggttgagcgttcacgtatcagggctcccctgagaggcatcgtaaaaaatattcgggtaaatactttgggaggcgtggtttctgcaggacaggacataatggaaattattccgctggaagaccagttgctgattgaggcttatataaatccacgggatgttgcctatgtcagaacagggatgccggcacttgtaaaactgacggcttatgactatgccatttatggtggtcttgacggagtggtgacactggtaagtccggatactttacgtgaccagaaacggccgggagatttaaaactggatccaaatgaagcatattatcgagtactggttactaccagtaataattatctgacagacaggaacggaaaaatattgccagttattcctggcatgatagccagcgtggatataaaaacaggtcagaaaagtgtatttcagtacctgattaaaccaatcaccagaatgaaacaagctcttcaggaacgatgatttattatattattaatatcatggctccgtaatacagacactcaacaggaagtctgtatcgtatcgcaatgaaaaaataattttattaaatttaaggagaataagtcacgtatagaaattattatttttccacctctggaaatgattaatttattttatattgataatcgcaggttttaattagcctaaggattttatatgaaaatgatttttaccggtaaggtcagcggagaaaaaaccgtgctgactgtcggaggtcgtcatacagttaaagcacagcccggggagcagtatggactgatcgatgaggtgaccggcctagtgcctgacggtgttgaggcggatcgctccggtgatgatttaattctgcgtaaaaaggaagaagatactgaggtccggatagagggattctgggaagaatgccagcccggggaaacacagtgtacggcggtatttaatattgttggggaagatggacaggtcaccgaagccgtactgactcaggatggcccggtgctggatgatattactgccggacaatcgggaaccttgtcagatgatgatcgtggcggttttatatggttgggcggtctggcatttggtgggggactggctgctatggctttagctgcaggtggcggtggaagcaaacatagacatgaaaatgatgactctgatactacagccccatcgtcaccagcactgaaggcagaggatgacggttctgtttctgttgagctgccgggtgatgccaataaaggcgataccgtggatgtcacctttgaagatgaaaaaggtggtaagcacaccgtgacgctggagaaaggggataacggctggacatccagtgatccgacgctgatcccggacagcactggcgataaagcgaccattccggcagataacgtgaaggataacagtgaagttaccggggttgccaaagatccgagcggtaatgaaagtgacccgtcaaccgtgacgtcaaaaactgatggtgtggcagatgccccggttctgagcattcctgaagtgactgacggttatgccaatgctgatgagctgaaagacggtttgcaggcagaggtcacgttgccgcaggcacgcagaaggtgcagttattacacttaccgtgacccgtccggacaaaaccacggagaacgtgacacatacgtgactaaagatgaagtggctgccgggtaaagtatccatggatattccgaaggatgcggtgattgacgggcagaacagcgtcagtgtcactctgactcagggcagtaacccggcgaaacccgggaatgtggttgattttgctgccgatacccagatcccgggggataccgatggtgatggtgcaacagatgcaacaccggtagttgccattccggaagcggcagatggtgtgaatgccgaagagctgaaggatggtgtacagaccgaagtcacggtacctgaaaggcagcgcttgccggtgataccctgacgctgacggtcaccaaaccggacggcacgacggacacggtggagcacacgctgaccgcagatgaagtggctgcaggtaaagctgatgtgaccattccggcggataaagtgacggcagatggtcagtattctgtaaccgcggaaatcacagacccggcaggtaacaccagtggccagggccagccggctgacttcgcagtggatacagtggcgccgtcggcaccggtattaaaagcagaggatgatggttctgtttctgttgagctgccgggtgatgccaataaaggcgataccgtggatgtcacctttgaagatgaaaaaggtggtaagcacaccgtgacgctggagaaaggggataacggctggacatccagtgatccgacgctgatcccggacagcactggcgataaagcgaccattccggcagataacgtgaaggataacagtgaagttaccggggttgccaaagatccgagcggtaatgaaagtgacccgtcaaccgtgacgtcaaaaactgatggtgtggcagatgccccggttctgagcattcctgaagtgactgacggttatgccaatgctgatgagctgaaagacggtttgcaggcagaggtcacgttgccggcaggcacggcagaaggtgcagttattacacttaccgtgacccgtccggacaaaaccacggagaacgtgacacataccgtgactaaagatgaagtggctgccggtaaagtatccatggatattccgaaggatgcggtgattgacgggcagaacagcgtcagtgtcactctgactcagggcagtaacccggcgaaacccgggaatgtggttgattttgctgccgatacccagatcccgggggataccgatggtgatggtgcaacagatgcaacaccggtagttgccattccggaagcggcagatggtgtgaatgccgaagagctgaaggatggtgtacagaccgaagtcacggtaccgaaaggcagcgctgccggtgataccctgacgctgacggtcaccaaaccggacggcacgacggacacggtggagcacacgctgaccgcagatgaagtggctgcaggtaaagctgatgtgaccattccggcggataaagtgacggcagatggtcagtattctgtaaccgcggaaatcacagacccggcaggtaacaccagtggccagggccagccggctgacttcgcagtggatacagtggcgccgtcggcaccggtattaaaagcagaggatgatggttctgtttctgttgagctgccgggtgatgccaataaaggcgataccgtggatgtcacctttgaagatgaaaaaggtggtaagcacaccgtgacgctggagaaaggggataacggctggacatccagtgatccgacgctgatcccggacagcactggcgataaagcgaccattccggcagataacgtgaaggataacagtgaagttaccggggttgccaaagatccgagcggtaatgaaagtgacccgtcaaccgtaacctcaaaaactgatgtgttaccaacagtgagtattagcgttgagacaacatcaacagatgtcaatggtgatggttttactggtatagctagtgtcaatgggaccgtaatggatgttcccgcaactattgaagataaggatgattccactggactggtttatacggtttctctgaatcatgtcactacaacagatgtaacagttacagttacattgggtagcggagctgggcattctgatgctgctgactattctgatattggtggagcacagcataacgggaaaattggccttcatggtgatactggaaaagtaacctatgatggtgcaacaaccgtaacaattgttattcctgccggttcaaaaagtgtttcatttatagttgatccaacgcttgaggctaaccaagatgcctttaatgccgagggtatggaaaaagttgttgcgaccattacgggaacatctgataacgttacggcagctactgacatcgttgataatgcgggagcatccgcaacaggtgttatttatgatggtaatgccatttcattacgtaatctggacggtgattttacactgaaatattcactatcatcttctatcgccgaaaaaggggactttgggtataccattggcgcgaatagtggtgaaaatgatccaatggtaacaacagattacaatgatacggtttatgttggttattaccagagtggtaaagaaacaacatcgtatagtaatgttgctaactcacaggataatgggccagacggaacaaaaaccgatggcaatcaaagcattacgactgttgatttaggtgctggtgatgatctaatggtcattcgtggtaacatgctggctaatacaagagtatatactggtgagggtaacgatacttttactatggatggtatgaatactgcattacgtgttatgtatgcgggtagttatatctttactgagtctggcgatgatattgttacgatcaaacgtactggtgtaacaaatgccggacagatttatcttggttcaggtagtgatacatttatccagggggatgctactgacaataacgatacaacattatctggtttattggatcttggtagtggtacaaaagatatatctaatatgcctaaggaatatctttctgtttatcaggatggcagtaatttaagcttgggtaacgacaacaatattgacactgccacagatgttaataccgtcactatttatggctctgtgtctggtgaaattttaggcggatacggcagtgataatattacggtaactaaaaatctgaccggtaatatttctgtcggtgacaatgcggataccttaacggccggatggatttatggtggcagtactgtctctatgggggacggcaatgatactgttaccatcacagatggtgcatataacacgactatttcactgggggcgggagatgatgtatttgatgcaacttctggtgtaatgggggattctgcttatgccactgtcgttaatggtgaagacggcaatgatacctttaaattaggcacaattgccaaaaacctgaccattgatgccggtgccggtgatgatattgttgttctgacaaaagactatgactccacctcctccggtaatcagggctatattaacggcggggaaggcagtgataccctggttctgacaggtaccatttctgtcaatctagcggccggtaaaaatgaaggtattgccggcttcgagaaagtggatatgactgttggtagcgatctgaaagcctgacaatgcagctcagttagtcaagttaacggcatcggatgtattgggtataaatgacaattcaacgatttatatttccggtgatgccaatgacaaagttgatttgggggctgacggagcgggaagtctgggtacatttacggcaacggcaacaactgttaaagcaactgcgttagatggtattgagcatacttatacgttatacagcagtgtaagtggcgcaaatgtgtatattgataacaatattattgatgcgaatggtgtaatttaatagttgtcttattcatgtgggagggaaacttcccacatttttgagtgttatagaaacaacttaataatttgcaaatgagtcaatatgacatttatatacttcttgtagaaggcataatgtatgaatataatgattgttacgcacaataaatatcttgagttaggtttgaaaaaattattgagcaggcattctattactattggtgctgatttttttataccagataatcgtgagcatataataaacaataatatttttgtcattctctgtgataaaaaaaacagtatgttaatgaattatatttttaacggttatagattttacttattaccagtagaatcaataagtagcctgtcatcgatttatgaatgtatgtttagtggcaggttgttgtttgggaactctccacataaattaaccatgaatgagatgattatactattctattatgttttccatgggtggaatgtagcaagtattgcttatcagtttggtatgagttcaaagactgtgtatactcatatatataaagcaaagaaaaaaaatggaatatcaggaaaaaatctcaaatataaatgtgcttatgaaaggcttgtctgttaattgaagtgttggtcgctttatatgaaagttatatgtgataatcgttatttccttattgggatcaacaaaacaattgaagatgtcatccagaaaaataaaattaatggcgtaaaaaatattattataatatcatcccctaaaacgtcagatgttttttgttttttacagttcaataacattgattttaggtgttcggataccattttttatgctccccctgaaacctttgattttctcagggatattatccacgcccctatttgcaatataaaggatttaactaaaaacaatccacttaataacacacattatatttatagagtaaagaactctcattataagctttctttatctggaaggcagaaggaggtcctgctgatgtttttatatggtttaagtggaaaagatattgctaataacctcggcgtttcaataaaaactgtttcgagttataaaaagtctttaatgaatagactgtatgtcagtaatgatatacagttattttacaaaggtctattattatgtagataagtgctaattgaacgcgtttgatattaacgacttcagcccagtctgttaccagttgagcatggtgataacgtgcaccatccagaatgatgttgactgtttgattataatcaggataaacctttcttatctcattgaaaaaccgggatatgcttaacgcattaatggttgggtactcactgatgagtgggcgttccggagacttcagatttagcgcacccatgatattcagccgtgtacggctacctgttgtttctattgctttccggtgcccttttcgtatccagccataactgattttggtggcctgagtggggtggacagcatctataaaaagaacaggttcatcgcctgctttttctttcaggtcttcataaattcaatgaattgcgcctgcctctcttcgctgaatttatgaggcgttccagccggttttttgtaagagaagccgttacgatgcaaccatttgttcataccggcaacgctgaacaaaattccccatgtgtggagaacaaaggcgataatttcatgagtatggtgaaacaaattatcagataaatgtttgattaagagtgatgtttgttcagcactgagtttactgtctgaaccaccgttttcgggctttaacttccctttattcataaactcatggatatgatgatcaacggtggtctgatgcaggcgcagagcctgagcaatcatgactgaactccagccttcagaagccagaagaatggctttaatacgatcgcagacccgcttgttacgactggtatcgtgaaggcgttccagctctgctttttgtagatcggagatgaagattttcatgttgcgtagcatgatcctctgtcatgacaaaatcaagcatcttcaatgatcacgggtatagcatcattattctataacatgaataaacggattgaatgtattatgttaaaaatgagtttatacgtaataatattgttattttcctttcagattagtgcagccattactagcaaggaaagtgaggctgtttcaccattattaatggatgttaattcttcactaacaatggaaatatttctgaatattccacatcatcggaaccatcgcaacagggcgtatttcctgtaatatgtactcgacttcatcctagatccgtaatgaaacgccagttattaacctgctaggggcctgtttttataattggtgatgatcctttttctctgcgctggatgagtgaacatctggagatccttaaatcgctaaatacccttggtttggttgttaatgttgaatcagtagaacgaatggaggtattacagaagcgggctgatgggttattgttattgccagttatctgcgataatttcgtgcaaatgctgcaattaaatgcttatccggtattgatcacagagatggaaatatcacaatgattaataacataattactgctaataatatcgtaattttgaaagtggtaatcctgttcacggcactataattagagttatgtcttgtatccgttcagtataatttcacgaatgctttattaaccggatgcgtgaatgtcattcttcagatgacaaagacgtcatcgcgattgatggaaaagcacttccacactcctatgataaaagccgtcgcaggagagcgggctttc

SEQ ID NO: 830 - DNA, 423 bp, Escherichia coli
gtgcaaataaccgaagcgttattttcagagcagggagacatccggcgttttgttcagcaggcggtggaccactggacgcatctgctggcagtccacttcacactccattcggcagaaggaaatatcaacgggcaacagattcatgcattctgtacttccttttatgaacgtattactgagcgtaatcacacgaccagtccatcatcgccgctggtattacgctggttgcgggaacaactacatggaggagcaacaatacgatgcctgttgctgctcagccagacgagcatttgccatccgcgagccagtgtgacaggtgatgaagcatgttcacaactggtggatttactgcaacagacctggcgggtgataagtgctggcggacaatgtcgggtggaaagttttttttcgggttgcccggcc

SEQ ID NO: 831 - protein, 141 aa, Escherichia coli
VQITEALFSEQGDIRRFVQQAVDHWTHLLAVHFTLHSAEGNINGQQIHAFCTSFYERITERNHTTSPSSPLVLRWLREQLHGGATIRCLLLLSQTSICHPRASVTGDEACSQLVDLLQQTWRVISAGGQCRVESFFSGCPA

SEQ ID NO: 832 - DNA, 216 bp, Escherichia coli
atgaatatgaacctcatccacattcaaccattcttttgtttaccatctggttgtcgcccccctccaaaaagcaaattctcttacgcatactggagagtattccgtataaagattcagctggcaaaactttatcagcctgtaaaaactaacggaagagtcgatatttctcccgtccatcaccggatgattgttgcaataacccatagcatcagagac

SEQ ID NO: 833 - protein, 72 aa, Escherichia coli
MNMNLIHIQPFFCLPSGCRPPPKSKFSYAYWRVFRIKIQLAKLYQPVKTNGRVDISPVHHRMIVAITHSIRD

SEQ ID NO: 834 - DNA, 1227 bp, Escherichia coli
atgacacgtcgcgtagtgattacaggaatgggcggcgtgactgcctttggtgaaaactggcaggacgtttctgcacgcttactggcgtatgaaaatgcggtgcgcaaaatgccggagtggcaggtttacgacggcctgcacaccctgcttggcgcgcctgttgatgatttcacgctgccggagcactacacccgcaagcgtatccgtgcgatgggccgcgtgtcgcaaatgtcgacccgtgccagcgagctggcgttagagcaggcagggttgattggcgatccgatattaaccagcggcgaaacgggcattgcatacggctcatcgaccggcagtaccggcccggtaagcgagttcgccaccatgctgacggaaaagcacacgaacaacatcactggcaccacctatgtgcagatgatgccgcacactactgccgttaacaccgggctgttttttggactgcgcgggcgggtgattccgacctccagcgcctgcacgtcaggtagtcaggctatcggctacgcgtgggaagccattcgccatggttatcaaacggtgatggttgccggtggtgccgaagagttatgcccttcagaagcagcggtatttgatacgctttttgccaccagccagcacaatgatgcgccgaaaaccacaccttcaccgttcgatgaaaaccgcgacgggctggtgattggtgaaggcgcaggtacgctcatcctcgaagaactggagcacgccaaagcgcgcggcgcgaccatttacggtgaaatcgtcggctttgcgactaactgcgacgcggcacatattacccagccacagcgcgaaaccatgcagtattgtatggagcaatcgctgaaaatcgccgggttaagtgcacaagatatcggctatatttcagcgcatggtacggcgaccgatcgcggtgatatggcagaaagtctggcgacagcaaccatttacggtgataatgtgccggtctcctcgctgaaaagttattttggtcatacgcttggtgcctgtggcgcgctcgaagcctggatgagtctgcaaatgatgcgcgaaggttggtttgcgcctacgctaaacctgaataaaccagacccgaactgtggcgcgctggattacatcatgcatgaagcccgaaaggttgattgtgagtttttgcagagtaacaactttgcctttggcggcattaatacatccatcatcattaagcgctggccc

SEQ ID NO: 835 - protein, 409 aa, Escherichia coli
MTRRVVITGMGGVTAFGENWQDVSARLLAYENAVRKMPEWQVYDGLHTLLGAPVDDFTLPEHYTRKRIRAMGRVSQMSTRASELALEQAGLIGDPILTSGETGIAYGSSTGSTGPVSEFATMLTEKHTNNITGTTYVQMMPHTTAVNTGLFFGLRGRVIPTSSACTSGSQAIGYAWEAIRHGYQTVMVAGGAEELCPSEAAVFDTLFATSQHNDAPKTTPSPFDENRDGLVIGEGAGTLILEELEHAKARGATIYGEIVGFATNCDAAHITQPQRETMQYCMEQSLKIAGLSAQDIGYISAHGTATDRGDMAESLATATIYGDNVPVSSLKSYFGHTLGACGALEAWMSLQMMREGWFAPTLNLNKPDPNCGALDYIMHEARKVDCEFLQSNNFAFGGINTSIIIKRWP

SEQ ID NO: 836 - DNA, 729 bp, Escherichia coli
atgagtcgttcagttctggttaccggtgccagcaaaggcattggtcgcgccatcgcctgccaactggcggcagacggctttaacattggcgttcactatcaccgtgacgccgcgggcgctcaggaaacgctgaacgccattgtcgccaacgggggtaacgggcgtttgctcagtttcgacgtcgcaaaccgcgaacagtgtcgggaagtgctggagcacgagatcgcgcaacatggtgcctggtacggcgtggtcagtaacgccgggatcgcccgcgatgccgcttttccggctttaagcaatgacgactgggatgcggtgatccacaccaacctcgacagtttctacaacgtcattcagccgtgcattatgccgatgatcggcgcacgccagggtgggcgcatcatcacgctgtcctcggtttccggcgtaatgggcaatcgcggccaggtgaactacagcgctgccaaagccggaattatcggcgcaacaaaagcactggctatcgaactcgcgaagcgcaaaatcaccgtcaattgcatcgcgccagggcttattgataccgggatgatcgaaatggaagagagcgctctgaaagaggcaatgtcgatgatccccatgaaacgcatgggccaggcggaagaagttgccgggcttgccagctatttaatgtctgatattgcgggttacgtcacccgccaggttatttccatcaatggagggatgtta

SEQ ID NO: 837 - protein, 243 aa, Escherichia coli
MSRSVLVTGASKGIGRAIACQLAADGFNIGVHYHRDAAGAQETLNAIVANGGNGRLLSFDVANREQCREVLEHEIAQHGAWYGVVSNAGIARDAAFPALSNDDWDAVIHTNLDSFYNVIQPCIMPMIGARQGGRIITLSSVSGVMGNRGQVNYSAAKAGIIGATKALAIELAKRKITVNCIAPGLIDTGMIEMEESALKEAMSMIPMKRMGQAEEVAGLASYLMSDIAGYVTRQVISINGGML

SEQ ID NO: 838 - DNA, 462 bp, Escherichia coli
gtgagccactatttatcccccggcgcttatctgccccacgacgcgcccatgttactgctggaagacgtggtgagcgtcagcgatgacagcgcggtgtgccgcgtgacggtttcgcccagtggcgtactggcaccgtttctcgacccggacggcaatctccctggctggtttgcccttgaactgatggcgcaaaccgtcggcgtctggtctggctggcatcgccaccagcagggcaaaaacagtattgagttagggatgatactgggcgcgcgtgaattgctttgcaccgctggcattctgcccgcaggccagacgctgactattaccgtcaagctgctgatgcaggacgatcgcttcggcagttttgagtgcagcatcaacgacggcgaggcgacgggccgcattaacaccttccagccgaccgcggaagaacttaccaccctgtttcaacaaggagcgtcc

SEQ ID NO: 839 - protein, 154 aa, Escherichia coli
VSHYLSPGAYLPHDAPMLLLEDVVSVSDDSAVCRVTVSPSGVLAPFLDPDGNLPGWFALELMAQTVGVWSGWHRHQQGKNSIELGMILGARELLCTAGILPAGQTLTITVKLLMQDDRFGSFECSINDGEATGRINTFQPTAEELTTLFQQGAS

SEQ ID NO: 840 - DNA, 1167 bp, Escherichia coli
atgatttatatttccgccgtcggcatgatcaacgccctgggaaataaccttgacgaaatcgcaaccaacctgactcgcggtgttgctcccggaatgcgcccgcgcgcaggctggttgcaggggcatccgcaggcggtcctggctggcgtggatggcgagcttccgcttatcccggaaaaattcgctgcgcaccgctcgcgcaacaatcagatcctgctggcggcgctggcgcagctccagccgcaggttgatgacgctatagcgaaatatggtcgcgagcgcatcgcgattgtacttggcaccagcacctccggcctgcatgaaggcgacacgcacgttaacctgcgcacccacgggcagccgagcaccacatggcactacgcgcaacaggaactcggcgatccgtcgcgttttctcagccactggctggcgctcgacggcccggcctataccctttcaaccgcctgctcttccagcgccagagcgataatcagcgggcgcaggcttatcgaagcggggctggtcgatgccgccattgtgggtggcgcagacaccctgagccggatgccgattaacggttttcacagcctcgaatcgctgtcgccaaccttatgtcagccgtttggtcgtgaccgcgcaggtatcaccattggtgaaggggcggggctaatgctgctgacccgggaaccgcagcccatcgcgttgctgggcgttggtgaatcgagcgacgcttaccatatttcagccccgcatccgcagggcgaaggagcgatccgcgctattaatcaggcgctgaccgatgcgcagcttacgccggatgacgtcggctatatcaacctgcacggcaccgccacacagctcaacgaccagattgaatcaatggtggttaacgccctgtttggcgaacgcgtaccgtgcagctccaccaaacatttgaccggacacacgctgggcgcagcgggcattaccgaggcagcaattagtatgttgattttacagcgtgatttaccgctgcccgctcaggacttcagtctgtcgccgcgcgatcccacgctgccaccgtgtggcattatcgaaaaaccgcagccgctggcacgtccggtgatcctgtccaattccttcgcctttggcggcaataacgccagcattctgctcgggagggtttcg

SEQ ID NO: 841 - protein, 389 aa, Escherichia coli
MIYISAVGMINALGNNLDEIATNLTRGVAPGMRPRAGWLQGHPQAVLAGVDGELPLIPEKFAAHRSRNNQILLAALAQLQPQVDDAIAKYGRERIAIVLGTSTSGLHEGDTHVNLRTHGQPSTTWHYAQQELGDPSRFLSHWLALDGPAYTLSTACSSSARAIISGRRLIEAGLVDAAIVGGADTLSRMPINGFHSLESLSPTLCQPFGRDRAGITIGEGAGLMLLTREPQPIALLGVGESSDAYHISAPHPQGEGAIRAINQALTDAQLTPDDVGYINLHGTATQLNDQIESMVVNALFGERVPCSSTKHLTGHTLGAAGITEAAISMLILQRDLPLPAQDFSLSPRDPTLPPCGIIEKPQPLARPVILSNSFAFGGNNASILLGRVS

SEQ ID NO: 842 - DNA, 582 bp, Escherichia coli
atgatcaaatccacattctggcgagcgctcgccctgaccgctacgcttatcctcactggctgtagccactcgcaaccggaacaggaaggccgcccgcaggcgtggctgcaacctggtacgctcatcacgctgcctgcgccggggatttcacccgcagtcaattcccagcaactgttgaccggcagcttcaacggcaaaacccagtctctgctagtgatgcttaatgccgaagatcagaaaatcacccttgccgggctgtcgtcggtcggcattcgcctgtttctggtgacctacgatgcaaaagggctacgcgccgagcaatccatcgtcgtcccacagttaccgcccgcaagtcaggtactggctgacgtgatgctcagccactggccgattagcgcctggcaaccgcaacttcccacaggctggacgcttcgcgacaacggcgacaaacgcgagctgcgtaacgccagcggcaaactggtcacggaaatcacctatctgaatcgccagggaaaacgcgtgccaatcagcattgagcagcatgtctttaaataccacatcaccattcaatacttaggtgac

SEQ ID NO: 843 - protein, 194 aa, Escherichia coli
MIKSTFWRALALTATLILTGCSHSQPEQEGRPQAWLQPGTLITLPAPGISPAVNSQQLLTGSFNGKTQSLLVMLNAEDQKITLAGLSSVGIRLFLVTYDAKGLRAEQSIVVPQLPPASQVLADVMLSHWPISAWQPQLPTGWTLRDNGDKRELRNASGKLVTEITYLNRQGKRVPISIEQHVFKYHITIQYLGD

SEQ ID NO: 844 - DNA, 636 bp, Escherichia coli
atgccggtgaaggttgatgaatggctggcaagccccgccagtgaaggctggcgtctgctgtggctgacgctggaaaatggcgcaagcggcgtgctggtgccggttgaaggggttaaaaatagcgcggcgctacaggaaatctccagctattacccttgtggcattgcctgggttgatcgcaaaaacacctttgatgaattgttcgcactttaccgttatgtgttaaccggcttgttgctggtggcgctggcagtaattgcctgcggcgcagtggcccgcctcggctggcgcaaagggtttatcagcctggtgccttcggtgctttcgctgggctgcggtctggctgtgctggcgattagcgggcaggcggtgaatctcttttcgctgctggcgctggtgctggtgcttggcatcggcatcaattacacgctgtttttcagtaatccgcgcggtacaccgttaacttccctactggcgatcacgctggcaatgctcaccaccttgctgacgctgggaatgctggtattcagcgccacccaggccatcagcagttttggcattgtgctggtgagcggtattttcaccgccttcctgctttcgccgctggcgatgcccgataaaaagagaacaaaaaaa

SEQ ID NO: 845 - protein, 212 aa, Escherichia coli
MPVKVDEWLASPASEGWRLLWLTLENGASGVLVPVEGVKNSAALQEISSYYPCGIAWVDRKNTFDELFALYRYVLTGLLLVALAVIACGAVARLGWRKGFISLVPSVLSLGCGLAVLAISGQAVNLFSLLALVLVLGIGINYTLFFSNPRGTPLTSLLAITLAMLTTLLTLGMLVFSATQAISSFGIVLVSGIFTAFLLSPLAMPDKKRTKK

SEQ ID NO: 846 - DNA, 1653 bp, Escherichia coli
ctgttatgggggctagtctgcctggtcatggcggcggcgttgctgatcctgctgccgcaatcacggctgaacagtagcgtgctggctatgttacccaaacaggtgatgggcgatattcccccagcgctgaatgacggctttatgcagcgtctggaccgccaactggtgtggctggtcagccccggtaaagaggctaatcccagggtcgctcaggagtggctgacgctgctgcaaaaatccgctgcgctcggcgacgttaaaggaccaatggatgccgccagccagcaatcgtggggagcgtttttctggcagcaccgcaacggcctgattgaccccgacacccgcgcccgcctgcaaaacggcggcgaagcgcaggcgcagtggatcctctcccagctttattccgcattctccggggtaagcggcaaggagctgcaaaacgatccgctgatgttaatgcgcggctcgcagctggcgatggcgaaaaacggccagcgtttgcggctgatggacggctggctggtgacgcaggatccccagggcaactactggtatctgctgcacggtgaactggcgggatcgtcgtttgatatgcagcaaacccaccagctcatcacgaccctgaatacgctggaaaaggatctgaaaacgcgttacccacaggcgcagttgctctcgcgcggcacggtattttacagcgattacgccagtcaacaggcgaagcaggatatctcaaccctgggcgtggcaacgctgctgggggtgatattactgattgtggcggtgttccgctctttgcgcccattgttgctttgcgtgatttccatcggcatcggcgcgctggcgggaacggtcgccactttattgattttcggtgaattacacctgatgacgctggtgatgagcatgagcgttatcggcatttccgctgactacacgctctattatctcaccgagcggatggtgcacggcaacgacgtttcgccgtggcaaagcctggcgaaagtacgcaatgccctgctgctggcgctgctcaccaccgtggcggcatatctgattatgatgctcgcccccttccccggtatccgccagatggcgatttttgccgccatcgggttgagcgcctcctgtctgaccgtcctgttctggcatccgtggctgtgccgtggcctgccggtgcgtccggttccggcgatggcgctgatgctacgctggctggcagcgtggcggcgcaataaaaaactgtcgcggggtctgtccgtcgcgctggcgctgttttcgctggcggggatgtcaatgctacgcgtcgatgacgatatctcgcagttacaggcgctgccgcagcatattctggcgcaggagaaagccattaccgccctgaccgggcagagcgtcgatcaaaaatggttcgtggtttacggcgactccccacagcaaacattacggcgactggagaaatttaccacctcgctggagaaggcgaaaaaagacgggcttatcagcaaataccgcaccattccactgaactcccttgcgcggcaggaggaagatttacatctgctgacaacagcggccccgacagtaacaaaagcactgcaaaatgccgggcgtgacaacagtgaacccggatctcaacgccatgccggtgaaggt

SEQ ID NO: 847 - protein, 551 aa, Escherichia coli
LLWGLVCLVMAAALLILLPQSRLNSSVLAMLPKQVMGDIPPALNDGFMQRLDRQLVWLVSPGKEANPRVAQEWLTLLQKSAALGDVKGPMDAASQQSWGAFFWQHRNGLIDPDTRARLQNGGEAQAQWILSQLYSAFSGVSGKELQNDPLMLMRGSQLAMAKNGQRLRLMDGWLVTQDPQGNYWYLLHGELAGSSFDMQQTHQLITTLNTLEKDLKTRYPQAQLLSRGTVFYSDYASQQAKQDISTLGVATLLGVILLIVAVFRSLRPLLLCVISIGIGALAGTVATLLIFGELHLMTLVMSMSVIGISADYTLYYLTERMVHGNDVSPWQSLAKVRNALLLALLTTVAAYLIMMLAPFPGIRQMAIFAAIGLSASCLTVLFWHPWLCRGLPVRPVPAMALMLRWLAAWRRNKKLSRGLSVALALFSLAGMSMLRVDDDISQLQALPQHILAQEKAITALTGQSVDQKWFVVYGDSPQQTLRRLEKFTTSLEKAKKDGLISKYRTIPLNSLARQEEDLHLLTTAAPTVTKALQNAGRDNSEPGSQRHAGEG

SEQ ID NO: 848 - DNA, 603 bp, Escherichia coli
atgaaatttttaccgctgctggcgctgctgattagcccgtttgtgagcgccctgaccctggacgatcttcagcaacgctttaccgaacaaccggtgatccgcgcccattttgatcaaacccggacgattaaagatctgccgcagccgctgcgatctcagggtcagatgttgatcgcccgcgaccaggggttattgtgggatcaaacctcaccgttccccatgcagctattgctggatgataaacgcatggtgcaggtgatcaacggtcagccgccgcaaatcatcacggcagaaaacaacccgcagatgttccagtttaaccacctgctgcgcgcgctgttccaggccgatcgcaaagtgctggaacaaaacttccgcgtcgaatttgctgacaaaggcgaaggccgctggacgctgcgcctgacgccgaccaccacgccgctggataaaattttcaacaccatcgatctcgccgggaaaacctatctggagagcattcaacttaatgataaacagggcgatcgcaccgatattgctcttacccaacatcaactgacgccagcgcaactgaccgatgacgaacaccaacgttttgccgcccag

SEQ ID NO: 849 - protein, 201 aa, Escherichia coli
MKFLPLLALLISPFVSALTLDDLQQRFTEQPVIRAHFDQTRTIKDLPQPLRSQGQMLIARDQGLLWDQTSPFPMQLLLDDKRMVQVINGQPPQIITAENNPQMFQFNHLLRALFQADRKVLEQNFRVEFADKGEGRWTLRLTPTTTPLDKIFNTIDLAGKTYLESIQLNDKQGDRTDIALTQHQLTPAQLTDDEHQRFAAQ

SEQ ID NO: 850 - DNA, 420 bp, Escherichia coli
gtgcttaacgatccccgatttaccgctgaagtcgagctgaccattccctttcacgacgtcgatatgatgggcgtggcctggcacggtaactattttcgctactttgaagtggcccgcgaggcgctgctcaaccagttcaattacggctatcggcagatgaaagagtccggttatttgtggccagtggtcgatgcgcgggtgaaatatcgccacgccctcacctttgagcaacgcatccgcgtgcgtgcgcatatcgaagagttcgaaaaccgtctgcggattggctatcagattttcgatgccgaaacgggcaaacgcgccaccaccggatacaccattcaggtcgcggtcgacgagcaaagtcgcgaactgtgctttgtcagccccgatattctgtttgaacgcatgggagtcaaacca

SEQ ID NO: 851 - protein, 140 aa, Escherichia coli
VLNDPRFTAEVELTIPFHDVDMMGVAWHGNYFRYFEVAREALLNQFNYGYRQMKESGYLWPVVDARVKYRHALTFEQRIRVRAHIEEFENRLRIGYQIFDAETGKRATTGYTIQVAVDEQSRELCFVSPDILFERMGVKP

SEQ ID NO: 852 - DNA, 702 bp, Escherichia coli
atgtcggtaaacttttctccctgcgtgttgatcccctgctacaaccacggcgcgatgatgccgggcgtgctggcgcgtcttaagccatttaatctgccctgtattgtggtggatgacggcagcgatgccgccacgcaacagcaactggataatctggttagcgaacagcctggcgtgaccttaattcgcctggcagaaaacgcaggtaaaggcgcagcggtgatgcgtggcttgcaggcagcggcagacgcagggttcagccatgcggtgcaagtggatgctgacggtcaacatgcgattgaagatatccccaaactgctggcactcgctgaacaacaccctgcggcgctgatctccggtcagccaatttacgatgactccattccccgctcacggctgtacgggcgctggatcacccacgtctgggtatggatcgaaacgctctccctgcaactgaaagacagcatgtgcggttttcgcgtttatccggttgcgccgacgctgcaactggcaaaacgcgccaccatcggcaagcggatggatttcgacaccgaagtgatggtgcgcctctactggcagggaaataccagctatttcgtgccgacccgcgtcacctatccgctggacgggctttcgcattttgatgccctgaaagataacgtccgcatctcgctcatgcacacgcgtctgtttttcggcatg

SEQ ID NO: 853 - protein, 234 aa, Escherichia coli
MSVNFSPCVLIPCYNHGAMMPGVLARLKPFNLPCIVVDDGSDAATQQQLDNLVSEQPGVTLIRLAENAGKGAAVMRGLQAAADAGFSHAVQVDADGQHAIEDIPKLLALAEQHPAALISGQPIYDDSIPRSRLYGRWITHVWVWIETLSLQLKDSMCGFRVYPVAPTLQLAKRATIGKRMDFDTEVMVRLYWQGNTSYFVPTRVTYPLDGLSHFDALKDNVRISLMHTRLFFGM

SEQ ID NO: 854 - DNA, 948 bp, Escherichia coli
atgtgccactcttccagccactgggcgcggcagagtgaagttaaagggttatggggaatgcgcctgatgctgctggtctggcgtctgctgggaagaacggcgtttaccgcgctgctttacccggtggtgggcgtctactggctcaccgctgctcgtgcgcgtaaagcgtcgcaagactggctcgcccgtgtgcgccaacaacaaccacaggcagcaaaaatcaacagctatcagcactttctacgtttcggtaatgccatgctcgacaaaatcgccagctggcgcggcgagctacaactggggcgtgatgtgctgtttgcgccaggcgcagaagcggcgcttgacgtccgcgatccgcgcggcaaattgctgctggcctcgcatcttggcgatgtggaagtgtgccgggcgctggcaaaaattcagggctacaaaaccattaacgcgctggtgtttagcgaaaacgcccaacgctttaaacagataatgcaggagatggctcctcaggcaggcattaacctgatgccggtaacagatatcggcccggaaaccgccatcctgctgaaagagaagctggataacggcgaatgggtggcgattgtcggtgaccgcatcgccgtcaacccgcaacgcggcggcgactggcgcgtctgctggagtccgtttatgggccagcctgcgcctttcccacaggggccgtttattctcgcgtctattttgcgctgcccggtgaatctgattttcgccctacgccagcacggcaagctgcatattcactgcgaaacctttgccgacccgctgctgttgccgcgtggcgaacgccaacaggcgctgcaaaacgctatcgaccactacgccgcgcgtctggaacattacgcgctccagtcgcccctcgactggtttaattttttcgatttctggcaactgccggaaattcaggacaaggag

SEQ ID NO: 855 - protein, 316 aa, Escherichia coli
MCHSSSHWARQSEVKGLWGMRLMLLVWRLLGRTAFTALLYPVVGVYWLTAARARKASQDWLARVRQQQPQAAKINSYQHFLRFGNAMLDKIASWRGELQLGRDVLFAPGAEAALDVRDPRGKLLLASHLGDVEVCRALAKIQGYKTINALVFSENAQRFKQIMQEMAPQAGINLMPVTDIGPETAILLKEKLDNGEWVAIVGDRIAVNPQRGGDWRVCWSPFMGQPAPFPQGPFILASILRCPVNLIFALRQHGKLHIHCETFADPLLLPRGERQQALQNAIDHYAARLEHYALQSPLDWFNFFDFWQLPEIQDKE

SEQ ID NO: 856 - DNA, 351 bp, Escherichia coli
atgatacgccatgaaattgagcgccatctggttcaaccgcaggagatggaaatcgttctataccttgacccgatgctctactggtttaatggtcattttgccgtacagcctctgttaccaggcgtggcccagttggactgggtaatgcattatgctaccacgctgcttgctccgggctggcgttttcgtagtatccagaatgttaaatttctggcgccacttatacctgagacgactgttaccctgcaattaacatggcaggaaacaagtcaggtactcactttctgctatcagcgtcacgacggtgacgcccgccacaccgccagtagcgggaagatccgcctatgtcgg

SEQ ID NO: 857 - protein, 117 aa, Escherichia coli
MIRHEIERHLVQPQEMEIVLYLDPMLYWFNGHFAVQPLLPGVAQLDWVMHYATTLLAPGWRFRSIQNVKFLAPLIPETTVTLQLTWQETSQVLTFCYQRHDGDARHTASSGKIRLCR

SEQ ID NO: 858 - DNA, 1356 bp, Escherichia coli
atgaatcagactctctctctttcacagtggttgacagcctctcgccctgtaacaactcctgttgcctggcttggggaatatacctggacactggggcatctgcggcatgatgtagcgcttttgatcgaccatttacgcgaccagccaggcaatcgctgggcactttgttttgaaaacagctatctttttattgtagcgttgttggccacgctacactcaggtaaaatcccggtaatcccgggccataatcgcgccgctttgttaaatgtacaacgctccttgtttgattgcgtcctgagtgataaaaggctgggctggaacggtccacagtttgttgtaagcacatctcaccagatgacgaccagcacgatagcctttgatgatattgcttctgacgcgtttattgaacttttcacatcgggttcaaccggacaaccaaaacaaattgcaaaacctcttatcagccttgatcaagaagcaaacatgctggcaactcactttgcagaccgactactgggctgtcgttttgtagcatccgtgatgcctcagcacctgtatgggctgactttccgtatttttttacccatggcacttggcctgccattgcatgccgcaatgctctggtattctgagcaacttgccgcattaagccatacctaccgctatgcctttgtcagcagcccggcgttccttaagcgactcgaccttcatctgacgcctcccccagtggaaatgattctctctgccggcggtatgctaccatggcaggatgtagagaaaacttccacctggctgaatatatggcccgatgaaatctatggtagtaccgaaacaggtattctcgcatggcgttaccgtcaacaggataatatcccctggtttactttttctgatgttcatctttcacaggaaagtgagggggttcgtgtcttttcgccactaatccctgctgaaggattggtgcttgacgatatgttgcaattcaatgaaaacggtcagttccacctgatcggacgacgtggtcgagtggtaaaaatagaggagaagcggatatcactggttgaaatcgaacaacgacttctggcacttgacggtattatggatgtcgctgcaataccattaatacgcaatggtcgccaggctatcggtgtcgtggttgtaccaaataaagaggcccgtcaaatatggcaatgctccggagggaaaactctggagttgtcctggcgcaaagcactattaccatggcttgaacctgttgcagtacctcgttactggcgcattattgatgaaataccagtaaacaatatgaataagcgtgtctatgcgcaattacaggagttatttcatgatacgcca

SEQ ID NO: 859 - protein, 452 aa, Escherichia coli
MNQTLSLSQWLTASRPVTTPVAWLGEYTWTLGHLRHDVALLIDHLRDQPGNRWALCFENSYLFIVALLATLHSGKIPVIPGHNRAALLNVQRSLFDCVLSDKRLGWNGPQFVVSTSHQMTTSTIAFDDIASDAFIELFTSGSTGQPKQIAKPLISLDQEANMLATHFADRLLGCRFVASVMPQHLYGLTFRIFLPMALGLPLHAAMLWYSEQLAALSHTYRYAFVSSPAFLKRLDLHLTPPPVEMILSAGGMLPWQDVEKTSTWLNIWPDEIYGSTETGILAWRYRQQDNIPWFTFSDVHLSQESEGVRVFSPLIPAEGLVLDDMLQFNENGQFHLIGRRGRVVKIEEKRISLVEIEQRLLALDGIMDVAAIPLIRNGRQAIGVVVVPNKEARQIWQCSGGKTLELSWRKALLPWLEPVAVPRYWRIIDEIPVNNMNKRVYAQLQELFHDTP

SEQ ID NO: 860 - DNA, 579 bp, Escherichia coli
atgtcgggcattcgctcgctaccgatgattaagttgctgaccggattattgctgctcgtctggccttttttaatctggctaggtttggtgcataacagcctgcactggctgttgccgctgatggcgctgttgcttttattgcgcctgcgccagccccgtcgccagacggggccgctccaggtcgtcacaaaaatcgttgctgttgtgggcattgtattgtgtgtctccagttttctgttgaaaacgtaccagttactgctgttttacccggtagtggttaacgcagtcatgctggcggtttttggcggttcgctgcggtcgacaatgccgatagttgagcggctggcacgtttgcaggagccagacctcccggaaaaggccgtgcgatatacccgccgcgtaacgcaggtctggtgcctgttttttattttcaatggcagtattgcgttatttaccaccttgtatggcaacatgcccttgtggacagcctggaacggtatcattgcttaccttctgataggtttcctgactgcaggggaatggctgatacgtcgtaagatgatcaaacggaaaacacca

SEQ ID NO: 861 - protein, 193 aa, Escherichia coli
MSGIRSLPMIKLLTGLLLLVWPFLIWLGLVHNSLHWLLPLMALLLLLRLRQPRRQTGPLQVVTKIVAVVGIVLCVSSFLLKTYQLLLFYPVVVNAVMLAVFGGSLRSTMPIVERLARLQEPDLPEKAVRYTRRVTQVWCLFFIFNGSIALFTTLYGNMPLWTAWNGIIAYLLIGFLTAGEWLIRRKMIKRKTP

SEQ ID NO: 862 - DNA, 249 bp, Escherichia coli
atgacagaccaacaaaccatttatcaggaagtctcagccctgctggttaagctgtttgaaatcgatccgcaggacatcaaacctgaagcgcgactgtacgaagatctggaactggacagcatcgacgccgttgacatgattgtgcacctgcaaaagaaaaccggtaagaaaatcaagccggaagagtttaaagcagtgcgtacagtccaggatgttgtcgaggctgtagaacgcctgctacaagaaggc

SEQ ID NO: 863 - protein, 83 aa, Escherichia coli
MTDQQTIYQEVSALLVKLFEIDPQDIKPEARLYEDLELDSIDAVDMIVHLQKKTGKKIKPEEFKAVRTVQDVVEAVERLLQEG

SEQ ID NO: 864 - DNA, 255 bp, Escherichia coli
atgcaagcgctttatctggaaattaaaaacctcatcatcagcaccctcaatctggacgacttgactcctgatgatattgatatcaatgcgccactgtttggcgacggtttagggctggactctatcgatgcactggaactgggactggcagtaaaaaatgagtacggcatcgtgctctctgcggaaagcgaagaaatgcgtcagcactttttctccgtcgccactctggcctctttcattgctgcgcaacgtgcc

SEQ ID NO: 865 - protein, 85 aa, Escherichia coli
MQALYLEIKNLIISTLNLDDLTPDDIDINAPLFGDGLGLDSIDALELGLAVKNEYGIVLSAESEEMRQHFFSVATLASFIAAQRA

SEQ ID NO: 866 - DNA, 807 bp, Escherichia coli
atgtcgcgcctgggatgggcatggcgactggtcatgaccgggttatgttttgtcctgtttggtctcggcggcctgctgctttcagtcgtgtggtttaacatattgttagttttagtgtgggatacttcccgccgccgtcgtttggcacgtcgcagcattgccgccagttttcgcctgtttttaactgtcgcgaaagggcttggcgtgctggattatcgtattgatggcgctgaaattttacgtcaggaacgcggttgcctcgtcgtagccaatcatcccacgctgatcgattacgtgctgctggcatcagtcatgccagaaactgactgcctggtgaaaagcgcgctgttaaaaaatccttttcttggcggcgtcgtgcgagcggcagattatttaatcaacagcgaagcagaaaccctgttaccccgctgccaacagcgactggcacagggtgacactatcctgattttccccgaaggcacacgaacgaagcccggtgaaaaaatgacgttacagcgcggtgcagcgaatattgccgtgcgctgcaccagcgatttacgcatcgtgacgatcggctgtagcgagcatctgctggataaacaaagtaagtggtatgacgtcccgcctgccaggccgttttttacggttgaagtccatgggcgggtagaaatcaataaattttacgatgcaacttcacaagagccgacgctggctgcaagacagttaaaccggcatcttttgcttcaattacagcaaggttgtttacctctatcaggaataaataatgcaagcgctttatctggaaat

SEQ ID NO: 867 - protein, 269 aa, Escherichia coli
MSRLGWAWRLVMTGLCFVLFGLGGLLLSVVWFNILLVLVWDTSRRRRLARRSIAASFRLFLTVAKGLGVLDYRIDGAEILRQERGCLVVANHPTLIDYVLLASVMPETDCLVKSALLKNPFLGGVVRAADYLINSEAETLLPRCQQRLAQGDTILIFPEGTRTKPGEKMTLQRGAANIAVRCTSDLRIVTIGCSEHLLDKQSKWYDVPPARPFFTVEVHGRVEINKFYDATSQEPTLAARQLNRHLLLQLQQGCLPLSGINNASALSGN

SEQ ID NO: 868 - DNA, 720 bp, Escherichia coli
atgaaatttgcattaaatattaccaactggcaggcactggcgcctggacttagcgatgtgcagcaatggcaagcatggtcgcgccagccgtgggcgattgaccctgccgcgccgttggcaaaattaagtgaactgccaatgatgaccgctcgtcgtctcagttcaggcagcaaactggctgttgaatgcggtctgacaatgctacgccgccatcagccagacgctgttttgtataccagtcgtcatggcgaactggagcgcaattaccgcattgttcatgcactggcaaccgaacaggcgctttctccgacggacttcgcgctttccgtacacaactcttccgtgggtaacctgaccattgtggccaaacagccgatcgtttcgtcatcgctttcggctggtcgcgacagtttccagcaaggtttgtgtgaagtgcttagcctgctacaagcgggataccagcgcgtgttgatggtcgattttgatggctttctacctgagttttatcacccgcaactgcccgcagaaatgcctacctggccgtacgccgtcgcgctggtgattgaagctggcgatgactggcaatgtgaaacgcagcaagccattgcggtaaatgaaacaacactgccgcaaagcatgttgtttttacagcactatttacaaaatgcagatgctttttcactgcctggcgagcgcgtgcaatggcgctggagccgcaga

SEQ ID NO: 869 - protein, 240 aa, Escherichia coli
MKFALNITNWQALAPGLSDVQQWQAWSRQPWAIDPAAPLAKLSELPMMTARRLSSGSKLAVECGLTMLRRHQPDAVLYTSRHGELERNYRIVHALATEQALSPTDFALSVHNSSVGNLTIVAKQPIVSSSLSAGRDSFQQGLCEVLSLLQAGYQRVLMVDFDGFLPEFYHPQLPAEMPTWPYAVALVIEAGDDWQCETQQAIAVNETTLPQSMLFLQHYLQNADAFSLPGERVQWRWSRR

SEQ ID NO: 870 - DNA, 1056 bp, Escherichia coli
atgtacgaacaggacacgctcagcgcactggatgccatcaccgaagcacagcggattgcctttgctcctatgcttttccaggcagctttgtgcctgcgcaatgcaggaatattagattatttggatcaacagggtaaacagggagctccccttaatgcgattactgagcacacagtcctgaatgaatatgccgtgggtgtgttactggatatgggcttaagcgggcgaattattacctgtaaagagggaatttattacctggcgaaaatcggtcattacctcctgcatgacactatgactcgcgtgaatatggatttcacccaggatgtctgttaccaggggctcttcttccttgccgattcactcaatgaaggaaaaccttccgggttaaaagtatttggcgactggccgacgatatatccggcactttcgcaattaccagacgccgcacgtgatagctggtttgcgtttgatcattactattcagatggcgcatttaacgccgcactgccttatgtattcgccaacaaccccacaaccttgtacgatgtgggtggcaatacgggtaagtgggctttgcgctgctgcaaattcaatgaaaacatcgccgttacgttattagatctgccacaacaaatcgtactggcgaaagaaaatatcgcgaatgcaggtttttctgatcgcatagatttccatgcggtggatatgctaagcgatgcaccattaccaggcgaggctgatatctggtggatgagccaatttttagactgtttttcacccgaacaaataattagcatactcagcaaaattgccagcgtaatgaagcctggcgcaaaactttgcatcatggagttgttctgggatgcacagcggtttgaagcgacatcgtttagcctgaatgcatcctcactttattttacctgcatggcaaacggtaacagccgtttctatagtgcagagaaattttacgactatctgaataaagcaggattccaggtagcagagcgtcacaataatttaggcgttgggcatacacttttgatatgccaaaagaaa

SEQ ID NO: 871 - protein, 352 aa, Escherichia coli
MYEQDTLSALDAITEAQRIAFAPMLFQAALCLRNAGILDYLDQQGKQGAPLNAITEHTVLNEYAVGVLLDMGLSGRIITCKEGIYYLAKIGHYLLHDTMTRVNMDFTQDVCYQGLFFLADSLNEGKPSGLKVFGDWPTIYPALSQLPDAARDSWFAFDHYYSDGAFNAALPYVFANNPTTLYDVGGNTGKWALRCCKFNENIAVTLLDLPQQIVLAKENIANAGFSDRIDFHAVDMLSDAPLPGEADIWWMSQFLDCFSPEQIISILSKIASVMKPGAKLCIMELFWDAQRFEATSFSLNASSLYFTCMANGNSRFYSAEKFYDYLNKAGFQVAERHNNLGVGHTLLICQKK

SEQ ID NO: 872 - DNA, 387 bp, Escherichia coli
atgaaacgttatataaaatggtttgccatcacaatttttatcagtatgttgagtgcctgtgtccgtacggccccagtgcaacagataagcaccactgtcagtgtgggtcatactcaggagcaggttaaaaatgccattttgaaagcaggtgcgcagcgcaagtggattatgacgcaagtgtcccctggagttattaaagctcgctatcaaacacgaaatcacgttgcagaggttcgtattacatatacagctacctactataacatcaaatatgacagtagcctgaatctgcaggcttctgatggaaaaattcataaaaactataaccgctgggtgcgtaacctggataaagatatacaggttaacttatctacaggagcaacgtta

SEQ ID NO: 873 - protein, 129 aa, Escherichia coli
MKRYIKWFAITIFISMLSACVRTAPVQQISTTVSVGHTQEQVKNAILKAGAQRKWIMTQVSPGVIKARYQTRNHVAEVRITYTATYYNIKYDSSLNLQASDGKIHKNYNRWVRNLDKDIQVNLSTGATL

SEQ ID NO: 874 - DNA, 204 bp, Escherichia coli
atgaaacagttttatgacaagacatcaaaaaaatgtcaaaaacgtgatctttcttcagcttttcagaatattgagtaccaggaagtcaatatcaattctgggacacatatgcatttaccattaaaaccgggcacaacaagctgttcagtctcaatccataccccgtgttttatcaatatcagaataagaatatgtgcggataaa

SEQ ID NO: 875 - protein, 68 aa, Escherichia coli
MKQFYDKTSKKCQKRDLSSAFQNIEYQEVNINSGTHMHLPLKPGTTSCSVSIHTPCFINIRIRICADK

SEQ ID NO: 876 - DNA, 5052 bp, Escherichia coli
atgcagcgccggcagaacaacattctgacgaaacgtcccttttatcccgtgcgttgtctgtcccctgttgtgatatgttccggcgcggctctccgtggatatgctatctctccctctccgttttttctggtttttttatccccgcattttcgtctccggcagccatgctgtctccgggtggccggtaccctgctgaacagtgcgctgatttatgcggggaataacctgaagctgtttacagaccgtctgcataaccagcatggtgatatcctggccgacaacagtctgtgggtacagaaggacagcagcgggacggcaaacagcgaaatcattaaccgttccggtaatattgaaaccatgcgtggcgatatcaccatgaatacggcgcatctgctgaattcatgggatgccatttcggccagccatgaggtcattccgggcagcagccgcggggtgatttcaccggttccggaaaataaccggtggtggggtgttgtccggcatgatggtgtggaatatctggccgtgtactggggtaagggtgccacggtacctgatgaataccgtatccgtacgggagatacggatacggtgacagtcagtgccaccggccatgctgccaggatatccggcggcgctgatatgcatatccgtgcaggacgactggataatgaggcatcgtttattctcgccggtggcagtatgaccctgagtggcgacacactgaacaatcagggctggcaggaggggaccaccggaaaggaaacggtctggcggcttgcctccgactcactccccaaagcgtggtttactgagccatggtacagggtctatcgccaggtctcgccggatgcgacagaagccagtggcacctctccggtaggtcagtaccgtgcggttatcagcgctgccggtgatgtgtctgccagctttgccactgacaccggtaataccactgtcatgccccgggcaggtggttcaggtaacacgataacggtgccttcgctgaactccctgacaccaccgacggtcagtcagggggtgagcggtgaagccctgctgaatgaaagcggtaccgggataaccggccctgtatggaatgacgcgctgccggatacgctgaaggatatcccgggtgcgctgtcgctgtacggggcaagtgtaagcagctatcccctgccatccggtaacaatggttattttgtcccgtccacggacccggacagtccgtatctgattacggtgaacccgaaactggatggtctcggaaaggtggacagcagtctgtttgccggactttatgacctgctcaggatgcaacccggagaggcaccacgtgaaacagacccggtgtatatcgatgaaaaacagtttctgggctcatcgtacattcttgaccgtcttggcctgaaaccggaaaaagattaccgctttctgggggatgcggcttttgatacccggtatgtcagtaacgtcatactgaaccagacgggctcacgttatatcaacggcacaggctctgacctgacgcagatgaaatacctgatggacagcgcggcagcacaacagaaagcgctcggactgacctttggtgtgtcgctgaccgccgggcaggttgcacaactgaccagaagcatactgtggtgggagtccgtcaccatcaacggacagacagtcatggttccgaaactgtatctgtctccggaagatatcacccttcataatggcagcgttatcagcgggaacaacgtgcagcttgcgggtggcaatattaccaacagcggcggcagcatcaacgcacagaatgacctcctgctcgacagcacaggtagtatcgacaacctgaatgccggactgataaacgccggtggtgcactgaacctgaaggccatcggggatatcagcaatatcagctcagtcatcagcggtaaaaccgtatccctggaaagcgccaccggaaacatcagtaacctaacccggacagaacagtgggcgatgaacaacggatataaccatttcagcggaacggataccggtccgctggctgctgtcagggcaacggactcactgtttatgggcgcagccggggatatcagtatcaccggtgccgccgtttctgccggtgacagcgtgttactgtccgccggtaatgacctgaacatgaacgcgatacaggccggagaacgtcgtcgctatggcgggtccgggtggtatgaaactcatgccgtggcccccacggtcactgccgggaacagtctgatgctttccgccggtcgtgatgtgaacagccaggctgccggtattacggctgaaaacagtatggatatccgcgccggacgggatgtgaacatggctgcggagtccacaggcgcaggtgaccacgacagcactttcagcatgaagacggttcatgattcggtccggcagcagggaacagacatgaccagtggcggtgacatcacggttactgccggacgggatatcacctcagttgcgactgctgtaacggcaaagggcgatatccgtgtgaatgccggtcatgacatcgtactgggtactgccacggaaagtgattatcactacagtgaatcaggggaaacccgcaaccgtctcctcagccatcagaccacccggaccatcacggaagacagcgtcacccgtgagaagggctctctgctgtcggggaatcgcgtgaccgttaacgccggcgataacctgacggtagagggttcggatgtggtggctgagccgggatgtgtcactggcggcggtaatcatgttgatgttcttgctgccaccagtacagatacgtcctggcgctttaaggaaacgaagaaatccggtctgacgggtaccggcggtattggtttcaccattggcagcagtaagacatcgcacgaccgccgcgaagccgggacaacgcagagtcagagtgccagtaccatcggctccactgccggtaatgtcagtattaccgcgggcaaacaggctcatatcagcggttcggatgtgattgcgaaccgggatatcagcattaccggtgacagtgtggtggttgacccggggcatgaccgtcgtactgtggacgaaaaatttgagcagaagaaaagcgggctgacggttgccctttccggcacggtgggcagtgccatcaataatgcggttaccagtgcacaggagacgaaggagagcagtgacagccgtctgaaagccctgcaggccacaaagacagcgctgtctggtgtgcaggccggacaggctgcgacaatggcctccgcaaccggtgacccgaatgcgatgggagtcagcctgtcgctcaccacccagaaatcgaaatcacaacaacattctgaaagtgacacagtatccggcagtacgctgaatgccgggaataatctgtctgttgtcgcaaccggtaaaaacaggggcgataaccgcggagatattgtgattgccggaagccagcttaaggccggtggtaacacaagcctggatgccgcgaatgatattctgttgagtggcgccgcaaacacacaaaaaacaacgggcaggaacagcagcagtggcggtggcgtgggtgtcagtatcggtgccggtggtaacggtgccggtatcagcgtctttgccggcgttaatgcggcaaaaggcagcgagaaaggtaacggtactgagtggactgaaaccacaacagacagcggtaaaaccgtcaccatcaacagtggtcgggatacggtactgaacggtgctcaggtcaacggcaacaggattatcgccgatgtgggccacgacctgctgataagcagccagcaggacaccagtaagtacgacagtaaacagaccagcgtggctgccggcggcagttttacctttggctccatgaccggctcaggttacatcgctgcctcccgggataagatgaagagccgctttgactccgttgctgaacaaaccggaatgtttgccggtgatggtggcttcgacattacagtgggcagacatacccaactggatggtgcggtgattgcctccactgccacaccggataaaaaccacctggataccggaacgctggggttcagtgaccttcacaacgaagcggattataaagtcagtcacagtggaatcagtctgagcggtggtggcagcttcggggataaatttcagggtaacatgccgggtggcatgatatccgccggaggtcacagcggacatgcggaaggaacgactcaggccgcagtggcagaggcacatcaccatccgggacagggacaatcagaagcagaatctggcgaacctgagcgtgaccctgcgcacgctaatgacagtatcagcccgatatttgaccaaggagaagagcagaggcgtctgcagacagtggggcttatcagtgacataggcagtcaggtggcggatattgcgcgtacacagggagaactgaatgcgttgaaggccgcgaaggaagcaaccgcgaaacacttcctgctatgcaacagagaaacaacgcaggaatatcttgcgaaactgcgtgacacgcaggcttacaggaatgaaatggcgaagtatggtaccggcagtgaaattcagcggggtatccaggccgcgacagcggcgcttcaggggctggcggggggtaatttagcaggtgctctggccggagcttcagcaccggaactggcacatctgctgaaatcaacagaaaaagacccggcagtaaacgccattgctcacgccattctgggcggcgcagtggcggcaatgcagggtaataatgtcgctgccggtgcagcaggcgcagcaacgggagagctggcagccagagcgattaccggaatgctgtatcctggcgtgaagcagtcagacctcagtgaagagcagaagcagacgataagtacgctggcaacgtgtcagcagggctggccgcggtctaccggaaacagcaccgcatcagcagcagtgggagcacaagcgggaagaatgctgttgagaataactcactcagtgctggctggaacaatatcctgccatcaggaacacaggattacggacaggccg

SEQ ID NO: 877 - protein, 1684 aa, Escherichia coli
MQRRQNNILTKRPFYPVRCLSPVVICSGAALRGYAISPSPFFLVFLSPHFRLRQPCCLRVAGTLLNSALIYAGNNLKLFTDRLHNQHGDILADNSLWVQKDSSGTANSEIINRSGNIETMRGDITMNTAHLLNSWDAISASHEVIPGSSRGVISPVPENNRWWGVVRHDGVEYLAVYWGKGATVPDEYRIRTGDTDTVTVSATGHAARISGGADMHIRAGRLDNEASFILAGGSMTLSGDTLNNQGWQEGTTGKETVWRLASDSLPKAWFTEPWYRVYRQVSPDATEASGTSPVGQYRAVISAAGDVSASFATDTGNTTVMPRAGGSGNTITVPSLNSLTPPTVSQGVSGEALLNESGTGITGPVWNDALPDTLKDIPGALSLYGASVSSYPLPSGNNGYFVPSTDPDSPYLITVNPKLDGLGKVDSSLFAGLYDLLRMQPGEAPRETDPVYIDEKQFLGSSYILDRLGLKPEKDYRFLGDAAFDTRYVSNVILNQTGSRYINGTGSDLTQMKYLMDSAAAQQKALGLTFGVSLTAGQVAQLTRSILWWESVTINGQTVMVPKLYLSPEDITLHNGSVISGNNVQLAGGNITNSGGSINAQNDLLLDSTGSIDNLNAGLINAGGALNLKAIGDISNISSVISGKTVSLESATGNISNLTRTEQWAMNNGYNHFSGTDTGPLAAVRATDSLFMGAAGDISITGAAVSAGDSVLLSAGNDLNMNAIQAGERRRYGGSGWYETHAVAPTVTAGNSLMLSAGRDVNSQAAGITAENSMDIRAGRDVNMAAESTGAGDHDSTFSMKTVHDSVRQQGTDMTSGGDITVTAGRDITSVATAVTAKGDIRVNAGHDIVLGTATESDYHYSESGETRNRLLSHQTTRTITEDSVTREKGSLLSGNRVTVNAGDNLTVEGSDVVAEPGCVTGGGNHVDVLAATSTDTSWRFKETKKSGLTGTGGIGFTIGSSKTSHDRREAGTTQSQSASTIGSTAGNVSITAGKQAHISGSDVIANRDISITGDSVVVDPGHDRRTVDEKFEQKKSGLTVALSGTVGSAINNAVTSAQETKESSDSRLKALQATKTALSGVQAGQAATMASATGDPNAMGVSLSLTTQKSKSQQHSESDTVSGSTLNAGNNLSVVATGKNRGDNRGDIVIAGSQLKAGGNTSLDAANDILLSGAANTQKTTGRNSSSGGGVGVSIGAGGNGAGISVFAGVNAAKGSEKGNGTEWTETTTDSGKTVTINSGRDTVLNGAQVNGNRIIADVGHDLLISSQQDTSKYDSKQTSVAAGGSFTFGSMTGSGYIAASRDKMKSRFDSVAEQTGMFAGDGGFDITVGRHTQLDGAVIASTATPDKNHLDTGTLGFSDLHNEADYKVSHSGISLSGGGSFGDKFQGNMPGGMISAGGHSGHAEGTTQAAVAEAHHHPGQGQSEAESGEPERDPAHANDSISPIFDQGEEQRRLQTVGLISDIGSQVADIARTQGELNALKAAKEATAKHFLLCNRETTQEYLAKLRDTQAYRNEMAKYGTGSEIQRGIQAATAALQGLAGGNLAGALAGASAPELAHLLKSTEKDPAVNAIAHAILGGAVAAMQGNNVAAGAAGAATGELAARAITGMLYPGVKQSDLSEEQKQTISTLATCQQGWPRSTGNSTASAAVGAQAGRMLLRITHSVLAGTISCHQEHRITDRP

SEQ ID NO: 878 - DNA, 441 bp, Escherichia coli
ctgacaccggagcaggttcaagaagggatgaatcgtatagctattggtgaagggccttcttgggggacaacatataaagtacacccggtagttcaggctggcggtgatgttagctttatccggggttatactttaagcggaactatagatgacaatcatatttcagttaatcaaggggatatttatagtataggtgctcatggcggagcctcgatcggattatcctttggcccgtatttcccgggattaataaattcaaatgataacgattattcgataaatggtggttttggcgttggtgcagtggggctttctacgggtaaagatggtgttagtttcacttttggttttggcccaagttggggttggagtgcaactgaaattaaaggcgttgacgttaatggcacttcaacaagtgaggtttatcgatatgattttaaa

SEQ ID NO: 879 - protein, 147 aa, Escherichia coli
LTPEQVQEGMNRIAIGEGPSWGTTYKVHPVVQAGGDVSFIRGYTLSGTIDDNHISVNQGDIYSIGAHGGASIGLSFGPYFPGLINSNDNDYSINGGFGVGAVGLSTGKDGVSFTFGFGPSWGWSATEIKGVDVNGTSTSEVYRYDFK

SEQ ID NO: 880 - DNA, 456 bp, Escherichia coli
atgattttaaataatttctatagtttactatttttattgatgcttgcgctgtcaatattttccttcacagtgctatttgctttgtttatatataaagatctcggtggtgtaaaatttgcccgggactcttttttgttttttgattatatattttttagttctgacatgagagcaaatgcctctgcactatcggttatctgtgtttttatatttggattggcttttgatcataatcgtaatccacttgttaagaattacttgatcgatatagtatggtttttaggtgttgttttattttttatacactgtcgttttttttctaatctggaatatggtaagacaaaaattatttttgtaagagagctttttttcaacctaaaaataaaactaaggttaatatttttatggttgtcacgattattattcatcatattgatattaaatcgtttttatcgt

SEQ ID NO: 881 - protein, 152 aa, Escherichia coli
MILNNFYSLLFLLMLALSIFSFTVLFALFIYKDLGGVKFARDSFLFFDYIFFSSDMRANASALSVICVFIFGLAFDHNRNPLVKNYLIDIVWFLGVVLFFIHCRFFSNLEYGKTKIIFVRELFFNLKIKLRLIFLWLSRLLFIILILNRFYR

SEQ ID NO: 882 - DNA, 375 bp, Escherichia coli
atggcgacatgtacagaaaactcttccggtgccgcctgccagaaagcaatgaatgagagggatgctgtagggctggctctggcaacaggtactgtggcactactccccggtagtgctcaggctatgtggggacttggagcaagtgcgaatgctggtatcagttatctggctgatggtactgtagatccggcaaacgcagccattgcaggctgggtgaatgtgttcagcatgggtaatggcctggcggggactgtgggctggaatgctgcaggtggtgcgctgggtaactggatcggcaacaaagatcctctgtctggtgcaatttcaaatggtatcggttctgctgccgggtatggtatcggtaaaggtattact

SEQ ID NO: 883 - protein, 125 aa, Escherichia coli
MATCTENSSGAACQKAMNERDAVGLALATGTVALLPGSAQAMWGLGASANAGISYLADGTVDPANAAIAGWVNVFSMGNGLAGTVGWNAAGGALGNWIGNKDPLSGAISNGIGSAAGYGIGKGIT

SEQ ID NO: 884 - DNA, 207 bp, Escherichia coli
atgaaatattcttttcgagtggtaataggtaagtttattatatgcagttcaattctcttattgtgttttattggcatgatcttagcggccataataactaaactaacgtttgtagcgttagcatggtttcaaagcgggatttttgaagttttgtggagcgatattgtttatgctgctcagttgggtggtctgggggggggggcatat

SEQ ID NO: 885 - protein, 69 aa, Escherichia coli
MKYSFRVVIGKFIICSSILLLCFIGMILAAIITKLTFVALAWFQSGIFEVLWSDIVYAAQLGGLGGGAY

SEQ ID NO: 886 - DNA, 1170 bp, Escherichia coli
ctggccaaaggccttaaaaccgaagccgacctcaaccagttttcacgcatgttgacaaagcttaccgtcgaaacggcgctcaatgcagaactgactgaccatctcggtcatgagaaaaatgctcctaaatcaggctctaatacccgtaatggctactcgtcaaaaacggtattgtgcgatgatggcgagatcgaacttaacacgccgcgtgaccgtgaaaataccttcgaaccgcaactaattaagaagcatcagacacgcatcacccagatggacagccagattttgtccctgtatgccaaaggcatgactacgcgggaaatcgttgccacgttcaaagaaatgtacgacgccgatgtctcgcccacgctgatatccaaagtgaccgatgcggttaaagagcaggtctctgaatggcaaaatcgaccgttggatgcactgtatcccattgtttatcttgactgtattgtggttaaggttcgtcacggcgggagtgtcattaacaaagcggtgttcctcgcgctgggcatcaataccgacggtcagaaagagctgctgggtatgtggctggcagaaaatgaaggtgcaaagttctggctgggtgtactgactgagctgaaaaatcgtggccttcaggacatcctgattgcctgcgtggacggcctgaaaggcttcccggaagcgataaatagcgtgtacccgcagacgcatattcagctctgcatcatccatatggtgcgcaacagcctgaaattcgtgtcgtggaaggattacaaagccgtcaccagcgggctgaaagcggtatatcaggccccgacagaggaagcggcgttgatggcgttggataagtttgcaggcgtctgggatgaaaaatacccgcaaatcagcaagagctggcgcacacactgggaaaatctcaacaccttcttcggttacccaccggatatccgcaaggccatctacacgacgaatgccatcgaatcgctgaacagcgtcattcggcaggcgataaagaagcgcaaggtgttcccaacggacgactcggtgcgaaaagtgatttatctggcgatacagtcggcgtcaaaaaaatggagtatgccaatccagaactggcggctggcaatgagccgttttattatcgagtttggtgaccgccttagcgagcacctt

SEQ ID NO: 887 - protein, 390 aa, Escherichia coli
LAKGLKTEADLNQFSRMLTKLTVETALNAELTDHLGHEKNAPKSGSNTRNGYSSKTVLCDDGEIELNTPRDRENTFEPQLIKKHQTRITQMDSQILSLYAKGMTTREIVATFKEMYDADVSPTLISKVTDAVKEQVSEWQNRPLDALYPIVYLDCIVVKVRHGGSVINKAVFLALGINTDGQKELLGMWLAENEGAKFWLGVLTELKNRGLQDILIACVDGLKGFPEAINSVYPQTHIQLCIIHMVRNSLKFVSWKDYKAVTSGLKAVYQAPTEEAALMALDKFAGVWDEKYPQISKSWRTHWENLNTFFGYPPDIRKAIYTTNAIESLNSVIRQAIKKRKVFPTDDSVRKVIYLAIQSASKKWSMPIQNWRLAMSRFIIEFGDRLSEHL

SEQ ID NO: 888 - DNA, 270 bp, Escherichia coli
atgcgttattcttcttatgcaaaaaaaacatataattcaggattacaacgagcaagtgtaaatgatgagcacttttcgcttctgattgaaatatcaccaatcagaagtgaaaaaacaatagtggctcttagagaatatttggtttatggttactcaaaacaagaaagctgtgacagaaataatgtatccaatagttatttttgtttgtgtctgaaaaaactgaattatacccatggtattgtatctgccctgaaatatttctatcaaaca

SEQ ID NO: 889 - protein, 90 aa, Escherichia coli
MRYSSYAKKTYNSGLQRASVNDEHFSLLIEISPIRSEKTIVALREYLVYGYSKQESCDRNNVSNSYFCLCLKKLNYTHGIVSALKYFYQT

SEQ ID NO: 890 - DNA, 4113 bp, Escherichia coli
gtgaataaagtttattctcttaaatattgccctgtcaccgggggacttattgttgtctctgaacttgccagcagggtaataaaaaagacatgccgaagattaacgcatattcttctggctggcattccagcagtctatctgtattaccctcagatatcccaggcgggcattgtccgttccgatattgcctatcagatttatcgtgatttcgctgaaaacaaagggctttttgtacctggtgccacagatattccggtatatgataaggacggaaaacttgtggggagactggataaagccccaatggccgatttcagcagtgtgagctcaaatggcgttgctacgcttgtatcacctcagtatatcgtcagcgtaaagcataacggaggatatcagagtgtgagctttggtaatgggaaaaatacatattcccttgttgaccgtaataaccactcttctgttgacttccatgctccacgtctgaataaactggttacagaagttattccctcagcgataacatcagaaggaaccaaagccaatgcttataaagacactgaacgttacaccgctttttatcgggtgggtagtggtacgcagtacactaaggacaaggacggaaatttagttaaggttgccggcggatatgcttttaaaacaggaggaaccacaggagttcctctgatatctgatgcaacaatagtctctaatcccgggcaaacctataatcctgtaaacggacctttacctgactatggtgcccctggggacagtggttctcctttgtttgcttatgatgaacaacaaaaaaaatgggttattgttgctgtattaagagcatatgcaggtattaatggtgctacgaactggtggaatgtcataccaacagattatctgaaccaggttatgcaggacgatttcgatgcccccgtggactttgtttccggactgccccccctgaactggacatacgacaaaacatcaggcacaggcaccctgagccagggcagtaaaaactggaccatgcacgggcagaaagacaatgatctcaatgccggtaaaaatctggtattcagcgggcagaacggtgcaattgtcctgaaagacagtgtgactcagggggccggttatctcgaatttaaagacagttacaccgtatctgctgaatccggaaaaacctggacgggtgccggcattattactgacaaggggacgaatgtgacctggaaggtcaacggggttgccggtgacaacctgcataaattgggggaaggaaccctgaccataaacggaacaggtgtaaacccgggaggactgaaaacgggagacggtaccgttgtacttaaccagcaggcagacactgcaggtaatgttcaggccttcagttccgtgaacctcgccagcggacgaccgaccgtggtgctcggagatgcccgtcaggtcaatccggataacatttcatggggataccggggaggtaagcttgaccttaatggtaatgccgttaccttcacccgactgcaggctgccgattacggggcggtgattacaaataatgcacagcaaaaatcccggcttttactggatcttaaggctcaggatacaaatgtcagtgttccgattggcagtatatccccctttggcggtaccggcacaccgggaaacctatacagcatgatactcaacggccagacccgcttctatattctgaaatctgccagctatggtaacaccctgtgggggaacagcctgaatgacccggctcagtgggaatttgttggcacggacaaaaacaaagcagttcagacagtaaaagaccggatcctggccgggcgggcaaaacaacccgttatctttcatggtcagctgaccgggaatatggatgtcaccattccacagctgccggggggaagaaaggtcatccttgatggtagcgtgaacctgccggaaggtaccctgagtgaggacagtggcaccctgatattccaggggcatccggttatccacgcctccgtcagtggcagtgcgccggtcagcctgaaccagaaagactgggaaaaccgccagttcataatgaaaacactgtcgctgaaagatgctgacttccatctttcacgtaacgcctcgctgaacagtgacattaagtcggataacagccatatcacactgggaagtgacagggtatttgtggataaaaatgacggaacaggaaattatgtcattctggaggaaggtacctctgtcccggacaccgtgaatgacaggagccagtatgaagggaatattacgctggaccataactcaaccctggatatcggcagccggttcaccggagggattgaagcttatgacagtgccgtcagtatcacctctccggacgtcctgttaacagccccgggtgcttttgccggcagttcactgacagtgcatgatggcggtcatcttacagcactgaacggtcttttcagcgacgggcatattcaggccggtaagaacagcaaaatcaccctgagcggtacaccggttaaagatacggctaaccagtatgcccctgctgtatatctgacggacggatatgacctgaccggcgataacgcaacactggaaattacccgtggagcacatgcttccggtgatattcatgcctctgcggcatcaacagttaccatcgggtctgacacgccggcagaactggcttctgcggaaacgactgcatcggcgtttgccggcagtcttcttgagggctataacgcagcattcaatggtgccataaccggtggcagggctgatgtcagtatgcataatgcactgtggactctgggtggggactccgccatccacactcttaccgtcagaaacagccgtatcagttctgaaggagaccgtactttccgtaccctgacggtgaataaactggatgcaacaggcagtgattttgttctgcgtacggacctgaaaaatgccgataaaattaatgtgactgaaaaagccacgggttcagataacagcctgaacgtcagctttatgaaggatccggctcagggacagtccctgaatattcctctggtcacggcaccggcgggaacttcagcagagatgtttaaggccggcacccggatgataggtttcagtcgggtgactccaaccctgcatgttgacaccagtggtggcaatacgaagtggatactggacggttttaaagcggaggctgataaagccgctgccgcgaaggctgacagtttcatgaatgccgggtataaaaacttcatgacggaagtcaacaatctgaacaaacgtatgggtgacctgcgtgacacaaacggtgatgccggagcctgggcgcgcatcatgagtggtgccggttctgcagacggtggttacagtgataattacacccatgttcaggtcggctttgacaaaaaacatgaactggacggagtggacctgtttaccggtgtcacgatgacctataccgacagcagtgcagacagccatgcgttcagcggcaagacgaaatcggtggggggcggtctgtatgcttcagcattgtttgagtccggtgcctatatcgatttgattggtaaatatattcaccatgacaatgattacacaggtaactttgccggtctgggaacgaaacactacaacacccattcctggtatgccggtgctgaaacgggttaccgctatcacctgacagaggaaacgttcattgagccgcaggctgaactggtttacggcgccgtgtccgggaaaacattccgctggaaagacggtgatatggacctgagcatgaagaacagggacttcagtccgctgattggaagaacagggattgaactgggcaagaccttcagtggtaaggactggagtgtgacggcccgtgccgggaccagctggcagtttgacctactgaataatggtgagacggtactgcgtgatgcgtccggggagaaacggataaaaggcgagaaagacagccggatgctgtttaatgttggtatgaatgcgcagataaaggacaatatgcgctttggtctggagtttgagaagtcagcctttggtaaatataacgtggataatgcggtaaacgcaaatttccggtatatgttc

SEQ ID NO: 891 - protein, 1371 aa, Escherichia coli
VNKVYSLKYCPVTGGLIVVSELASRVIKKTCRRLTHILLAGIPAVYLYYPQISQAGIVRSDIAYQIYRDFAENKGLFVPGATDIPVYDKDGKLVGRLDKAPMADFSSVSSNGVATLVSPQYIVSVKHNGGYQSVSFGNGKNTYSLVDRNNHSSVDFHAPRLNKLVTEVIPSAITSEGTKANAYKDTERYTAFYRVGSGTQYTKDKDGNLVKVAGGYAFKTGGTTGVPLISDATIVSNPGQTYNPVNGPLPDYGAPGDSGSPLFAYDEQQKKWVIVAVLRAYAGINGATNWWNVIPTDYLNQVMQDDFDAPVDFVSGLPPLNWTYDKTSGTGTLSQGSKNWTMHGQKDNDLNAGKNLVFSGQNGAIVLKDSVTQGAGYLEFKDSYTVSAESGKTWTGAGIITDKGTNVTWKVNGVAGDNLHKLGEGTLTINGTGVNPGGLKTGDGTVVLNQQADTAGNVQAFSSVNLASGRPTVVLGDARQVNPDNISWGYRGGKLDLNGNAVTFTRLQAADYGAVITNNAQQKSRLLLDLKAQDTNVSVPIGSISPFGGTGTPGNLYSMILNGQTRFYILKSASYGNTLWGNSLNDPAQWEFVGTDKNKAVQTVKDRILAGRAKQPVIFHGQLTGNMDVTIPQLPGGRKVILDGSVNLPEGTLSEDSGTLIFQGHPVIHASVSGSAPVSLNQKDWENRQFIMKTLSLKDADFHLSRNASLNSDIKSDNSHITLGSDRVFVDKNDGTGNYVILEEGTSVPDTVNDRSQYEGNITLDHNSTLDIGSRFTGGIEAYDSAVSITSPDVLLTAPGAFAGSSLTVHDGGHLTALNGLFSDGHIQAGKNSKITLSGTPVKDTANQYAPAVYLTDGYDLTGDNATLEITRGAHASGDIHASAASTVTIGSDTPAELASAETTASAFAGSLLEGYNAAFNGAITGGRADVSMHNALWTLGGDSAIHTLTVRNSRISSEGDRTFRTLTVNKLDATGSDFVLRTDLKNADKINVTEKATGSDNSLNVSFMKDPAQGQSLNIPLVTAPAGTSAEMFKAGTRMIGFSRVTPTLHVDTSGGNTKWILDGFKAEADKAAAAKADSFMNAGYKNFMTEVNNLNKRMGDLRDTNGDAGAWARIMSGAGSADGGYSDNYTHVQVGFDKKHELDGVDLFTGVTMTYTDSSADSHAFSGKTKSVGGGLYASALFESGAYIDLIGKYIHHDNDYTGNFAGLGTKHYNTHSWYAGAETGYRYHLTEETFIEPQAELVYGAVSGKTFRWKDGDMDLSMKNRDFSPLIGRTGIELGKTFSGKDWSVTARAGTSWQFDLLNNGETVLRDASGEKRIKGEKDSRMLFNVGMNAQIKDNMRFGLEFEKSAFGKYNVDNAVNANFRYMF

SEQ ID NO: 892 - DNA, 888 bp, Escherichia coli
atgatgccactgctggataagctgcgtgagcagtacggggtcggaccgctatgcagcgaactgcatattgccccgtcaacgtattaccactgtcagcaacagcgacatcatccggataaacgcagtgcccgtgcgcagcgcgatgactggctgaagaaagagatacagcgcgtatacgatgaaaatcacaaggtatacggtgtgcgtaaagtctggcgtcagttgttacgggaaggtatcagagtggccagatgcactgtggcacgtctcatggcggttatgggacttgccggtgttctccggggtaaaaaggtccgtacgaccatcagccggaaagccgttgccgcaggcgaccgcgtaaaccgtcagttcgtggcagaacgacctgaccagctgtgggtggctgattttacttacgtcagcacatggcagggcttcgtctatgtggcgttcatcattgatgtgtttgccggatacatcgtggggtggcgggtctcatcgtccatggaaacgacattcgtgctggatgcactggagcaggcgttatgggcccgtcgaccgtccggcacggtccatcacagtgataaaggttctcagtatgtatcgctggcctacacacagcggcttaaggaagccggattactagcatcaacaggaagtacaggcgactcgtatgacaacgcgatggcggagagcatcaatggtctttacaaagcggaggtaatacaccgtaagagctggaaaaaccgtgcagaagtggaactggccacactcacgtgggtggactggtataacaatcgacgattgctggaaaggctgggccatactcctccggcagaagcagaaaaagcttattatgcttccatcggaaacgatgatctggcagcc

SEQ ID NO: 893 - protein, 296 aa, Escherichia coli
MMPLLDKLREQYGVGPLCSELHIAPSTYYHCQQQRHHPDKRSARAQRDDWLKKEIQRVYDENHKVYGVRKVWRQLLREGIRVARCTVARLMAVMGLAGVLRGKKVRTTISRKAVAAGDRVNRQFVAERPDQLWVADFTYVSTWQGFVYVAFIIDVFAGYIVGWRVSSSMETTFVLDALEQALWARRPSGTVHHSDKGSQYVSLAYTQRLKEAGLLASTGSTGDSYDNAMAESINGLYKAEVIHRKSWKNRAEVELATLTWVDWYNNRRLLERLGHTPPAEAEKAYYASIGNDDLAA

SEQ ID NO: 894 - DNA, 324 bp, Escherichia coli
atgactaaaaatactcgtttttcccccgaagtccgtcaacgggcagtccgtatggttctggaaagtcagagcgaatatgactcacaatgggcgacaatttgttccattgctccaaagattggctgtacgccggagactctgcgtgtctgggttcgccagcatgagcgggataccgggggcggtgatggagggctcaccaccgctgaacgtcagcgtctgaaagagctggagcgtgaaaatcgtgaactgcgccgcagtaacgatatccttcgccaggcttccgcttattttgcgaaggcggagtttgaccgcctctggaaaaaa

SEQ ID NO: 895 - protein, 108 aa, Escherichia coli; identical to SEQ ID NO: 531

SEQ ID NO: 896 - DNA, 249 bp, Escherichia coli
gtggcatcattttttccagaggcggtcaaactccgccttcgcaaaataagcggaagcctggcgaaggatatcgttactgcggcgcagttcacgattttcacgctccagctctttcagacgctgacgttcagcggtggtgagccctccatcaccgcccccggtatcccgctcatgctggcgaacccagacacgcagagtctccggcgtacagccaatctttggagcaatggaacaaattgtcgcccattg

SEQ ID NO: 897 - protein, 106 aa, Escherichia coli
LTGQYAVRCIAVRPRTAHAAYPAVASFFPEAVKLRLRKISGSLAKDIVTAAQFTIFTLQLFQTLTFSGGEPSITAPGIPLMLANPDTQSLRRTANLWSNGTNCRPL

SEQ ID NO: 898 - DNA, 1611 bp, Escherichia coli
atgggcaacgcaatgcactctcttaagacacttctacagttaccttgcggatgggaatgcagtcgacaaattattagatctgacggtataaccctccatctccgcggaaaacgcaaaacagcgcaatgtcctgaatgctttaagcgtagcgattctgttcatagttgtccccggcgccggatacagcatctaccctgcacaggccagacgctatggcttgtattttccgtccgccactggtactgccgtaacccggcttgttcacgtaaaatttttgccgggtcgcttgctcccttagccagttcacaccagcagtcttcacagtcgttacaaaatttacagcgtcagatgggattaatagccggaggtgaggctggaaaacgggcagcaacgacagtgggtctccgttgcagtgcagatactcttcttcgcaggcttataataccctggagacgaaactgtcaggctcgccccatgtcggtattgatgagtgcgtggcatcggggccactgctgcggtatgttaatagtcaatcttgatactcaccgtcccctcgtcctgttgcacggtcgcgatcagcatacgctggcgacctggttcagaaaatatccggaaatacaggttgtctcgcgtgatcgctgcggaatcaatgcgacagcagcacgtgaaggtgcacctcaggccagacaggtagctgaacgatggcttctgctaaacaatattggcgatgcgcctgaacgaatgatgtacagacatatgactctgatacgtcttgttaccagttagttgtcaccaaaggaataacccggggcaaaaccatctgtgcctgcagtatcgctccgtcgtccggaacgccttaaacagcaaacccgcaaaaaacggcatcagctttggacagaggttatggccctgcataacaagggatgtagtttcagggaaatatcccgtattacaggcctgtcgcgtgtgacagtcagtcgcagggggcgttcaggaacattccctgaaatgtcaacccggcctccaaagcgagggcttctggacccatggagggagtggttaaaagagcaacgagaaagtggtaattataacgccagcaggatatggcgggaaatggtggccaggggggtacaggcagtgaaaccatcgtcagggatgctgttgccaaatcgcgtaaaggctggatcccaccggttactactgccgtcagacttccttcagacttccttcagtgtcccgggtaagccactggttaataatcagggtgaagaaaattatgcttcccgatttattagtctgatgtgtgaaaaagaaccggagctgaaaatagcgcagcaactggtactcgagttctaccgtattctgaaaacccaaaataaatcacagctaagcagcttgttcactcgagtccacgaaagcggctcagcagaacttcggtgcgtggctgcggggatggaagctgatgctgcggctatatgtgaggcaatcagcagtcgctggagtaatggtgttgtcgaaggtcatgtaaatcgcctgaagatgttgaaacgccagatgtatggtcgagccggatttgaactactcaaacagagggtaatgagtccactggca

SEQ ID NO: 899 - protein, 537 aa, Escherichia coli
MGNAMHSLKTLLQLPCGWECSRQIIRSDGITLHLRGKRKTAQCPECFKRSDSVHSCPRRRIQHLPCTGQTLWLVFSVRHWYCRNPACSRKIFAGSLAPLASSHQQSSQSLQNLQRQMGLIAGGEAGKRAATTVGLRCSADTLLRRLIIPWRRNCQARPMSVLMSAWHRGHCCGMLIVNLDTHRPLVLLHGRDQHTLATWFRKYPEIQVVSRDRCGINATAAREGAPQARQVAERWLLLNNIGDAPERMMYRHMTLIRLVTSZLSPKEZPGAKPSVPAVSLRRPERLKQQTRKKRHQLWTEVMALHNKGCSFREISRITGLSRVTVSRRGRSGTFPEMSTRPPKRGLLDPWREWLKEQRESGNYNASRIWREMVARGVQAVKPSSGMLLPNRVKAGSHRLLLPSDFLQTSFSVPGKPLVNNQGEENYASRFISLMCEKEPELKIAQQLVLEFYRILKTQNKSQLSSLFTRVHESGSAELRCVAAGMEADAAAICEAISSRWSNGVVEGHVNRLKMLKRQMYGRAGFELLKQRVMSPLA

SEQ ID NO: 900 - DNA, 477 bp, Escherichia coli
atgagaatctccacccaggttgcagaagagccacttttccagttctgcatcagtaagtggaggtgttttttgagattttgtcatgtctttgctccggcctggttttatgttcagaagaccttcttcacccagtgccggataacggattcatttgagatattaaaccgtgcagcggcctcgcgcgtggtaagttcttcactcagagacttcaggacaaccgtcagtcgaaactcaggagtgtggaggtcatttttccatgtgatacgatcaatatcgtggagttaccagtctcttaccttacccagcagatgttttttcaacaccaaaacgtttagcgatacgacgtgcgccatcgtgtctggaaagataatgattaactacaaccaatctggtttcgagagaatattttggctttgccataaaaattgcacattaatcagttgggtctccaagttttggggtgcagtccacgtacaa

SEQ ID NO: 901 - protein, 159 aa, Escherichia coli
MRISTQVAEEPLFQFCISKWRCFLRFCHVFAPAWFYVQKTFFTQCRITDSFEILNRAAASRVVSSSLRDFRTTVSRNSGVWRSFFHVIRSISWSYQSLTLPSRCFFNTKTFSDTTCAIVSGKIMINYNQSGFERIFWLCHKNCTLISWVSKFWGAVHVQ

SEQ ID NO: 902 - DNA, 1245 bp, Escherichia coli
atgaagcgtaaacatttgttattattattgttgttttcattttccactaacagtgcgcctctttactccttaattagggaggcagttatgcacgatcccatagtaatggaagcccgggcggagttaacttcggcacaatcccgcatagagcaggcaagctctgcacattggccagttgtcacagctacaggaagtaaactcctttcacaaagtcaccgttattcctacgattatgacactgaagatattttacccggtattcgtggtgaagtgaatatatttgcttcaggggctattgaggcggatgtgcgtcggagtgagtcagaagccgaatattatcattataaaatggaagaaacaaaagaggaaacaattcactcttttgtttcattatatcttgatgcactcagggaaaaacaatccattgcggtacttgaacagagcctttcccggcataacgcaattcttaatgacctgaataccatcagtattcatgataccgggcgggagtctgagcttgttcaggccgaagccagaaggttgatggttcggcagcagataaattctaggagcagagtacttaaaaccacgctgggaaaactgtccacttggacaaaaaatccggtaaccgaagctgatcttgaaaatcctttttctaggatgacagaggccaaattattaactgattttacacaggctccacagaaaggtaacccgtcgtggcttgccagccaagctgatgttgagagtaaaaaagcggcactgaaagcacaggagcttgcccggtaccctcgggtggatttaacggggtctgtaacccgggatgaccagcagataggggtcaatctgtcttgggacctctttaaccgtaatgccagttatggtgttacagaaaaagctgcgcaaatagtggcagctaccggacgactggactctgtcgcccgaatgattgatgaaaccgggcgattatctctgataacagtcagacaaagtcgaggggaaatggaaacgctcagacgtcaggaacaggcttcagccagagttgtggacttttatcgtcttcagtttcaggtggcaagaaaaacactgattgaattactgaatgctgaaaacgaactgtacagtgtcggactctcccgggttcagacggaggatcagatgctccacggtatgctggattatctgtattcccagggaatgctcctgaaatggagcggagtgaatctttctggtgaagaagaaaaa

SEQ ID NO: 903 - protein, 415 aa, Escherichia coli
MKRKHLLLLLLFSFSTNSAPLYSLIREAVMHDPIVMEARAELTSAQSRIEQASSAHWPVVTATGSKLLSQSHRYSYDYDTEDILPGIRGEVNIFASGAIEADVRRSESEAEYYHYKMEETKEETIHSFVSLYLDALREKQSIAVLEQSLSRHNAILNDLNTISIHDTGRESELVQAEARRLMVRQQINSRSRVLKTTLGKLSTWTKNPVTEADLENPFSRMTEAKLLTDFTQAPQKGNPSWLASQADVESKKAALKAQELARYPRVDLTGSVTRDDQQIGVNLSWDLFNRNASYGVTEKAAQIVAATGRLDSVARMIDETGRLSLITVRQSRGEMETLRRQEQASARVVDFYRLQFQVARKTLIELLNAENELYSVGLSRVQTEDQMLHGMLDYLYSQGMLLKWSGVNLSGEEEK

SEQ ID NO: 904 - DNA, 2145 bp, Escherichia coli
gtgaagagtatttttgaaggattatcacagataacggcgttactgggtacacctgtatctgctgagactctggctgccggtactgtccgtacagatgtatccgggattgattttcgttctgttggcgagtttcttcgtagtgaaggatttgataatcatctttcccggcgatctccggaagatatcccgtcacttgcggttccggcgcttcttttattgaacgctcaggaagctattgtggtagtgcgtattgagggggccggtctggcaagacagtatcatgtgcttcagcctggaggtctccgtaagacactttctcacgatgcattaatggccgtttattctggttattgttggtttgttcagccacaggcaaagcaggatcgtcgctcggagctgccagagtatgacatgagcggggcatggttctggcgggtactgtggcgattcagggcatattacggacaggttattgttgcgagttttatcattaactttcttgctctggtcagttccctgtatgtaatgaacgtctatgaccgggttatacctaatcgttcctgggaaacgttatggatgctgagtatcggggtgattacagcaattctgtttgagtgtgctgcaaagttaatccggagttatctgacggatgttgcgggtaagaaggcagacctgattatcagctctgctctgctacgtcgggtgatggcggtaaaaatgtctgacaggccggcatcctctggttcatacgccagcaatttgcgggaatatgagtctgtcagggagtttatgaccagcgctacgttactggcttttgttgatctgccttttattctgcttttcatcagtgttatcgggctcgtgggaggctggcttgcggttgtacctcttacgctggtcccgctggttattctggcaggaatattactgcagcgaccgctttcccgtcatattaatgcctccatgcgggaatcatcgcagcgtcagggattacttgtggaggctctggacggaatagaaaccctgaagctgaataatgctgttaactgggttcagcgacgctgggatggatatactgcaagtgtcgcccgttcgtccattcgggtaaaaaataccagtaatgtcataatcagcttttccacagcaattcagcaaattaatactgttctgctggtcattctgggaacgtaccttattcacagtgatgacccacataaccgtatcaccatgggggcactgattgcagccgttattctttccggccgcgcgcttgcaccgcttggccagatagcatcactggccacccgtttccagcaggcccgtctggctatgcagggggtgaatgaaatagttcgccgcccggtggaacgggaaagtcagacacattatctgaccgtgaaggatatccagggggaattccatttcagcgcagtcacgtttttctataagcctgaattacctgcagccttgaaaggtatgtctgtctgtatccggcccggagaaaaggtgggcattattggcactatcggatgtggtaaatcgacgctactgaaaatgatggtagggctataccgtcaaaataaaggacaaattacccttgacggggttgctatgcagcaactggatccctgttttgttcgggataaggttttcctgcttgagcagaatccccggctttttctgggaactctgcgtgaaaatctgcagctttcgcgtcttccgggaagcctgtcggatgtggatatgattaatgcagccggacgtttcgggtttgaccgttttattcgtcatcacccatgcgggcttgatatgcagataggggaaggaggtcaggggctgtcaggaggacagcgtcagatggtcgctctgacgagaatggtactgggttctccccgggtagttctgcttgatgaacccacgacgggtcttgatctgcagacagagaacattgttctgaaagggctgaatcactggagccgtggacgcacaatggtggtggtgacgcatcgtctgcaggtgctgaatattgttgaccgtattatcgtgatgaatgaaggccgggtaatgatggatggtccccgcgatgaaatactgaaaaaactgtcagggaaacagcagagtggggagagcagagcgataacttca

SEQ ID NO: 905 - protein, 715 aa, Escherichia coli
VKSIFEGLSQITALLGTPVSAETLAAGTVRTDVSGIDFRSVGEFLRSEGFDNHLSRRSPEDIPSLAVPALLLLNAQEAIVVVRIEGAGLARQYHVLQPGGLRKTLSHDALMAVYSGYCWFVQPQAKQDRRSELPEYDMSGAWFWRVLWRFRAYYGQVIVASFIINFLALVSSLYVMNVYDRVIPNRSWETLWMLSIGVITAILFECAAKLIRSYLTDVAGKKADLIISSALLRRVMAVKMSDRPASSGSYASNLREYESVREFMTSATLLAFVDLPFILLFISVIGLVGGWLAVVPLTLVPLVILAGILLQRPLSRHINASMRESSQRQGLLVEALDGIETLKLNNAVNWVQRRWDGYTASVARSSIRVKNTSNVIISFSTAIQQINTVLLVILGTYLIHSDDPHNRITMGALIAAVILSGRALAPLGQIASLATRFQQARLAMQGVNEIVRRPVERESQTHYLTVKDIQGEFHFSAVTFFYKPELPAALKGMSVCIRPGEKVGIIGTIGCGKSTLLKMMVGLYRQNKGQITLDGVAMQQLDPCFVRDKVFLLEQNPRLFLGTLRENLQLSRLPGSLSDVDMINAAGRFGFDRFIRHHPCGLDMQIGEGGQGLSGGQRQMVALTRMVLGSPRVVLLDEPTTGLDLQTENIVLKGLNHWSRGRTMVVVTHRLQVLNIVDRIIVMNEGRVMMDGPRDEILKKLSGKQQSGESRAITS

SEQ ID NO: 906 - DNA, 1245 bp, Escherichia coli
atgacagaaaaaacggaacggaataaagcgtcgtcagaggtggttaggcagtcagacctggccctgttgacagatgtacaggcagcccttcagcaggaaaagcatcatgcccttttcctgatggtgatttttctgctggtactggtagtgacgtttgttatctgggcatggaacagtcctctggatgaagtgacccgtggtcaggggagtattattcccggcagcagggagcaggttatacagacccttgacccgggtattttgaaaacacttgaggtcagggaaggagatattgttgagaaaggtcaggtactgctgacactggatgatacccgaagctctgccatgctgagggaaagtgaagcccgggtgaataacctggaagcagtcagggcaagactccgtgcagaagcttattccgaatcactgacatttccggatgacgtgcctgcagatttgagggagagggaaagtactgtttatcgactacgaaagactgaactggcacaaagcatcgccggccttaagcagagtaaggctctgctggataaggaaatagcaatgacccggccaattgtgcgtgaaggggcgatgtcggaagtcgaactgttacgtatgcagcgtcagtcagcggagctgcagttacagatggatgagaaacagaataaatacctgacggaagctggagctgaactagtgaagacagaagcagagcttgcacaggcaaaagagaatatggctggcagagccgacccggttgagcgttcacgtatcagggctcccctgagaggcatcgtaaaaaatattcgggtaaatactttgggaggcgtggtttctgcaggacaggacataatggaaattattccgctggaagaccagttgctgattgaggcttatataaatccacgggatgttgcctatgtcagaacagggatgccggcacttgtaaaactgacggcttatgactatgccatttatggtggtcttgacggagtggtgacactggtaagtccggatactttacgtgaccagaaacggccgggagatttaaaactggatccaaatgaagcatattatcgagtactggttactaccagtaataattatctgacagacaggaacggaaaaatattgccagttattcctggcatgatagccagcgtggatataaaaacaggtcagaaaagtgtatttcagtacctgattaaaccaatcaccagaatgaaacaagctcttcaggaacga

SEQ ID NO: 907 - protein, 415 aa, Escherichia coli
MTEKTERNKASSEVVRQSDLALLTDVQAALQQEKHHALFLMVIFLLVLVVTFVIWAWNSPLDEVTRGQGSIIPGSREQVIQTLDPGILKTLEVREGDIVEKGQVLLTLDDTRSSAMLRESEARVNNLEAVRARLRAEAYSESLTFPDDVPADLRERESTVYRLRKTELAQSIAGLKQSKALLDKEIAMTRPIVREGAMSEVELLRMQRQSAELQLQMDEKQNKYLTEAGAELVKTEAELAQAKENMAGRADPVERSRIRAPLRGIVKNIRVNTLGGVVSAGQDIMEIIPLEDQLLIEAYINPRDVAYVRTGMPALVKLTAYDYAIYGGLDGVVTLVSPDTLRDQKRPGDLKLDPNEAYYRVLVTTSNNYLTDRNGKILPVIPGMIASVDIKTGQKSVFQYLIKPITRMKQALQER

SEQ ID NO: 908 - DNA, 4563 bp, Escherichia coli
atgaaaatgatttttaccggtaaggtcagcggagaaaaaaccgtgctgactgtcggaggtcgtcatacagttaaagcacagcccggggagcagtatggactgatcgatgaggtgaccggcctagtgcctgacggtgttgaggcggatcgctccggtgatgatttaattctgcgtaaaaaggaagaagatactgaggtccggatagagggattctgggaagaatgccagcccggggaaacacagtgtacggcggtatttaatattgttggggaagatggacaggtcaccgaagccgtactgactcaggatggcccggtgctggatgatattactgccggacaatcgggaaccttgtcagatgatgatcgtggcggttttatatggttgggcggtctggcatttggtgggggactggctgctatggctttagctgcaggtggcggtggaagcaaacatagacatgaaaatgatgactctgatactacagccccatcgtcaccagcactgaaggcagaggatgacggttctgtttctgttgagctgccgggtgatgccaataaaggcgataccgtggatgtcacctttgaagatgaaaaaggtggtaagcacaccgtgacgctggagaaaggggataacggctggacatccagtgatccgacgctgatcccggacagcactggcgataaagcgaccattccggcagataacgtgaaggataacagtgaagttaccggggttgccaaagatccgagcggtaatgaaagtgacccgtcaaccgtgacgtcaaaaactgatggtgtggcagatgccccggttctgagcattcctgaagtgactgacggttatgccaatgctgatgagctgaaagacggtttgcaggcagaggtcacgttgccgcaggcacgcagaaggtgcagttattacacttaccgtgacccgtccggacaaaaccacggagaacgtgacacatacgtgactaaagatgaagtggctgccggtaaagtatccatggatattccgaaggatgcggtgattgacgggcagaacagcgtcagtgtcactctgactcagggcagtaacccggcgaaacccgggaatgtggttgattttgctgccgatacccagatcccgggggataccgatggtgatggtgcaacagatgcaacaccggtagttgccattccggaagcggcagatggtgtgaatgccgaagagctgaaggatggtgtacagaccgaagtcacggtacctgaaaggcagcgcttgccggtgatacccctgacgctgacggtcaccaaaccggacggcacgacggacacggtggagcacacgctgaccgcagatgaagtggctgcaggtaaagctgatgtgaccattccggcggataaagtgacggcagatggtcagtattctgtaaccgcggaaatcacagacccggcaggtaacaccagtggccagggccagccggctgacttcgcagtggatacagtggcgccgtcggcaccggtattaaaagcagaggatgatggttctgtttctgttgagctgccgggtgatgccaataaaggcgataccgtggatgtcacctttgaagatgaaaaaggtggtaagcacaccgtgacgctggagaaaggggataacggctggacatccagtgatccgacgctgatcccggacagcactggcgataaagcgaccattccggcagataacgtgaaggataacagtgaagttaccggggttgccaaagatccgagcggtaatgaaagtgacccgtcaaccgtgacgtcaaaaactgatggtgtggcagatgccccggttctgagcattcctgaagtgactgacggttatgccaatgctgatgagctgaaagacggtttgcaggcagaggtcacgttgccggcaggcacggcagaaggtgcagttattacacttaccgtgacccgtccggacaaaaccacggagaacgtgacacataccgtgactaaagatgaagtggctgccggtaaagtatccatggatattccgaaggatgcggtgattgacgggcagaacagcgtcagtgtcactctgactcagggcagtaacccggcgaaacccgggaatgtggttgattttgctgccgatacccagatcccgggggataccgatggtgatggtgcaacagatgcaacaccggtagttgccattccggaagcggcagatggtgtgaatgccgaagagctgaaggatggtgtacagaccgaagtcacggtaccgaaaggcagcgctgccggtgataccctgacgctgacggtcaccaaaccggacggcacgacggacacggtggagcacacgctgaccgcagatgaagtggctgcaggtaaagctgatgtgaccattccggcggataaagtgacggcagatggtcagtattctgtaaccgcggaaatcacagacccggcaggtaacaccagtggccagggccagccggctgacttcgcagtggatacagtggcgccgtcggcaccggtattaaaagcagaggatgatggttctgtttctgttgagctgccgggtgatgccaataaaggcgataccgtggatgtcacctttgaagatgaaaaaggtggtaagcacaccgtgacgctggagaaaggggataacggctggacatccagtgatccgacgctgatcccggacagcactggcgataaagcgaccattccggcagataacgtgaaggataacagtgaagttaccggggttgccaaagatccgagcggtaatgaaagtgacccgtcaaccgtaacctcaaaaactgatgtgttaccaacagtgagtattagcgttgagacaacatcaacagatgtcaatggtgatggttttactggtatagctagtgtcaatgggaccgtaatggatgttcccgcaactattgaagataaggatgattccactggactggtttatacggtttctctgaatcatgtcactacaacagatgtaacagttacagttacattgggtagcggagctgggcattctgatgctgctgactattctgatattggtggagcacagcataacgggaaaattggccttcatggtgatactggaaaagtaacctatgatggtgcaacaaccgtaacaattgttattcctgccggttcaaaaagtgtttcatttatagttgatccaacgcttgaggctaaccaagatgcctttaatgccgagggtatggaaaaagttgttgcgaccattacgggaacatctgataacgttacggcagctactgacatcgttgataatgcgggagcatccgcaacaggtgttatttatgatggtaatgccatttcattacgtaatctggacggtgattttacactgaaatattcactatcatcttctatcgccgaaaaaggggactttgggtataccattggcgcgaatagtggtgaaaatgatccaatggtaacaacagattacaatgatacggtttatgttggttattaccagagtggtaaagaaacaacatcgtatagtaatgttgctaactcacaggataatgggccagacggaacaaaaaccgatggcaatcaaagcattacgactgttgatttaggtgctggtgatgatctaatggtcattcgtggtaacatgctggctaatacaagagtatatactggtgagggtaacgatacttttactatggatggtatgaatactgcattacgtgttatgtatgcgggtagttatatctttactgagtctggcgatgatattgttacgatcaaacgtactggtgtaacaaatgccggacagatttatcttggttcaggtagtgatacatttatccagggggatgctactgacaataacgatacaacattatctggtttattggatcttggtagtggtacaaaagatatatctaatatgcctaaggaatatctttctgtttatcaggatggcagtaatttaagcttgggtaacgacaacaatattgacactgccacagatgttaataccgtcactatttatggctctgtgtctggtgaaattttaggcggatacggcagtgataatattacggtaactaaaaatctgaccggtaatatttctgtcggtgacaatgcggataccttaacggccggatggatttatggtggcagtactgtctctatgggggacggcaatgatactgttaccatcacagatggtgcatataacacgactatttcactgggggcgggagatgatgtatttgatgcaacttctggtgtaatgggggattctgcttatgccactgtcgttaatggtgaagacggcaatgatacctttaaattaggcacaattgccaaaaacctgaccattgatgccggtgccggtgatgatattgttgttctgacaaaagactatgactccacctcctccggtaatcagggctatattaacggcggggaaggcagtgataccctggttctgacaggtaccatttctgtcaatctagcggccggtaaaaatgaaggtattgccggcttcgagaaagtggatatgactgttggtagcgatctgaaagcc

SEQ ID NO: 909 - protein, 1521 aa, Escherichia coli
MKMIFTGKVSGEKTVLTVGGRHTVKAQPGEQYGLIDEVTGLVPDGVEADRSGDDLILRKKEEDTEVRIEGFWEECQPGETQCTAVFNIVGEDGQVTEAVLTQDGPVLDDITAGQSGTLSDDDRGGFIWLGGLAFGGGLAAMALAAGGGGSKHRHENDDSDTTAPSSPALKAEDDGSVSVELPGDANKGDTVDVTFEDEKGGKHTVTLEKGDNGWTSSDPTLIPDSTGDKATIPADNVKDNSEVTGVAKDPSGNESDPSTVTSKTDGVADAPVLSIPEVTDGYANADELKDGLQAEVTLPQARRRCSYYTYRDPSGQNHGERDTYVTKDEVAAGKVSMDIPKDAVIDGQNSVSVTLTQGSNPAKPGNVVDFAADTQIPGDTDGDGATDATPVVAIPEAADGVNAEELKDGVQTEVTVPERQRLPVIPLTLTVTKPDGTTDTVEHTLTADEVAAGKADVTIPADKVTADGQYSVTAEITDPAGNTSGQGQPADFAVDTVAPSAPVLKAEDDGSVSVELPGDANKGDTVDVTFEDEKGGKHTVTLEKGDNGWTSSDPTLIPDSTGDKATIPADNVKDNSEVTGVAKDPSGNESDPSTVTSKTDGVADAPVLSIPEVTDGYANADELKDGLQAEVTLPAGTAEGAVITLTVTRPDKTTENVTHTVTKDEVAAGKVSMDIPKDAVIDGQNSVSVTLTQGSNPAKPGNVVDFAADTQIPGDTDGDGATDATPVVAIPEAADGVNAEELKDGVQTEVTVPKGSAAGDTLTLTVTKPDGTTDTVEHTLTADEVAAGKADVTIPADKVTADGQYSVTAEITDPAGNTSGQGQPADFAVDTVAPSAPVLKAEDDGSVSVELPGDANKGDTVDVTFEDEKGGKHTVTLEKGDNGWTSSDPTLIPDSTGDKATIPADNVKDNSEVTGVAKDPSGNESDPSTVTSKTDVLPTVSISVETTSTDVNGDGFTGIASVNGTVMDVPATIEDKDDSTGLVYTVSLNHVTTTDVTVTVTLGSGAGHSDAADYSDIGGAQHNGKIGLHGDTGKVTYDGATTVTIVIPAGSKSVSFIVDPTLEANQDAFNAEGMEKVVATITGTSDNVTAATDIVDNAGASATGVIYDGNAISLRNLDGDFTLKYSLSSSIAEKGDFGYTIGANSGENDPMVTTDYNDTVYVGYYQSGKETTSYSNVANSQDNGPDGTKTDGNQSITTVDLGAGDDLMVIRGNMLANTRVYTGEGNDTFTMDGMNTALRVMYAGSYIFTESGDDIVTIKRTGVTNAGQIYLGSGSDTFIQGDATDNNDTTLSGLLDLGSGTKDISNMPKEYLSVYQDGSNLSLGNDNNIDTATDVNTVTIYGSVSGEILGGYGSDNITVTKNLTGNISVGDNADTLTAGWIYGGSTVSMGDGNDTVTITDGAYNTTISLGAGDDVFDATSGVMGDSAYATVVNGEDGNDTFKLGTIAKNLTIDAGAGDDIVVLTKDYDSTSSGNQGYINGGEGSDTLVLTGTISVNLAAGKNEGIAGFEKVDMTVGSDLKA

SEQ ID NO: 910 - DNA, 480 bp, Escherichia coli
atgaatataatgattgttacgcacaataaatatcttgagttaggtttgaaaaaattattgagcaggcattctattactattggtgctgatttttttataccagataatcgtgagcatataataaacaataatatttttgtcattctctgtgataaaaaaaacagtatgttaatgaattatatttttaacggttatagattttacttattaccagtagaatcaataagtagcctgtcatcgatttatgaatgtatgtttagtggcaggttgttgtttgggaactctccacataaattaaccatgaatgagatgattatactattctattatgttttccatgggtggaatgtagcaagtattgcttatcagtttggtatgagttcaaagactgtgtatactcatatatataaagcaaagaaaaaaaatggaatatcaggaaaaaatctcaaatataaatgtgcttatgaaaggcttgtctgt

SEQ ID NO: 911 - protein, 160 aa, Escherichia coli
MNIMIVTHNKYLELGLKKLLSRHSITIGADFFIPDNREHIINNNIFVILCDKKNSMLMNYIFNGYRFYLLPVESISSLSSIYECMFSGRLLFGNSPHKLTMNEMIILFYYVFHGWNVASIAYQFGMSSKTVYTHIYKAKKKNGISGKNLKYKCAYERLVC

SEQ ID NO: 912 - DNA, 528 bp, Escherichia coli
ttgaagtgttggtcgctttatatgaaagttatatgtgataatcgttatttccttattgggatcaacaaaacaattgaagatgtcatccagaaaaataaaattaatggcgtaaaaaatattattataatatcatcccctaaaacgtcagatgttttttgttttttacagttcaataacattgattttaggtgttcggataccattttttatgctccccctgaaacctttgattttctcagggatattatccacgcccctatttgcaatataaaggatttaactaaaaacaatccacttaataacacacattatatttatagagtaaagaactctcattataagctttctttatctggaaggcagaaggaggtcctgctgatgtttttatatggtttaagtggaaaagatattgctaataacctcggcgtttcaataaaaactgtttcgagttataaaaagtctttaatgaatagactgtatgtcagtaatgatatacagttattttacaaaggtctattattatgtaga

SEQ ID NO: 913 - protein, 176 aa, Escherichia coli
LKCWSLYMKVICDNRYFLIGINKTIEDVIQKNKINGVKNIIIISSPKTSDVFCFLQFNNIDFRCSDTIFYAPPETFDFLRDIIHAPICNIKDLTKNNPLNNTHYIYRVKNSHYKLSLSGRQKEVLLMFLYGLSGKDIANNLGVSIKTVSSYKKSLMNRLYVSNDIQLFYKGLLLCR

SEQ ID NO: 914 - DNA, 411 bp, Escherichia coli
ctgaaagaaaaagcaggcgatgaacctgttctttttatagatgctgtccaccccactcaggccaccaaaatcagttatggctggatacgaaaagggcaccggaaagcaatagaaacaacaggtagccgtacacggctgaatatcatgggtgcgctaaatctgaagtctccggaacgcccactcatcagtgagtacccaaccattaatgcgttaagcatatcccggtttttcaatgagataagaaaggtttatcctgattataatcaaacagtcaacatcattctggatggtgcacgttatcaccatgctcaactggtaacagactgggctgaagtcgttaatatcaaacgcgttcaattagcacttatctacataataatagacctttgtaaaataactgtatatcattac

SEQ ID NO: 915 - protein, 137 aa, Escherichia coli
LKEKAGDEPVLFIDAVHPTQATKISYGWIRKGHRKAIETTGSRTRLNIMGALNLKSPERPLISEYPTINALSISRFFNEIRKVYPDYNQTVNIILDGARYHHAQLVTDWAEVVNIKRVQLALIYIIIDLCKITVYHY

SEQ ID NO: 916 - DNA, 474 bp, Escherichia coli
atgctacgcaacatgaaaatcttcatctccgatctacaaaaagcagagctggaacgccttcacgataccagtcgtaacaagcgggtctgcgatcgtattaaagccattcttctggcttctgaaggctggagttcagtcatgattgctcaggctctgcgcctgcatcagaccaccgttgatcatcatatccatgagtttatgaataaagggaagttaaagcccgaaaacggtggttcagacagtaaactcagtgctgaacaaacatcactcttaatcaaacatttatctgataatttgtttcaccatactcatgaaattatcgcctttgttctccacacatggggaattttgttcagcgttgccggtatgaacaaatggttgcatcgtaacggcttctcttacaaaaaaccggctggaacgcctcataaattcagcgaagagaggcaggcgcaattcattgaatttatgaagacc

SEQ ID NO: 917 - protein, 158 aa, Escherichia coli
MLRNMKIFISDLQKAELERLHDTSRNKRVCDRIKAILLASEGWSSVMIAQALRLHQTTVDHHIHEFMNKGKLKPENGGSDSKLSAEQTSLLIKHLSDNLFHHTHEIIAFVLHTWGILFSVAGMNKWLHRNGFSYKKPAGTPHKFSEERQAQFIEFMKT

SEQ ID NO: 918 - DNA, 240 bp, Escherichia coli
atgatcacgggtatagcatcattattctataacatgaataaacggattgaatgtattatgttaaaaatgagtttatacgtaataatattgttattttcctttcagattagtgcagccattactagcaaggaaagtgaggctgtttcaccattattaatggatgttaattcttcactaacaatggaaatatttctgaatattccacatcatcggaaccatcgcaacagggcgtatttcctg

SEQ ID NO: 919 - protein, 80 aa, Escherichia coli
MITGIASLFYNMNKRIECIMLKMSLYVIILLFSFQISAAITSKESEAVSPLLMDVNSSLTMEIFLNIPHHRNHRNRAYFL

SEQ ID NO: 920 - DNA, 561 bp, Escherichia coli
aagtaacaatctgaaaatgccgatgatgggatttggtgtttttcaggttaccgataaagacgtgtgcaaacagtcagtgttgaatgctatccgcacgggttatcgactcatcgacactgcagcggtatacggtaatgaagatgccgtcggtgaagccgttcgtgaagccatatctgaaggtttatgtacccgagaagagttatttataacgtctaaattgtgggtgcaggatatgttgaatcaggatattgcagcagcaggtattgaagcatcattaaaaaaatcggggctagaatgcttcgatctctatttattgcaccaggccatgcgcgattattttagtgcgtggcgtgcactcgaagatgcctatgaagagggcaaattaaaagcgattggggtttccaatttctaccctcatgttctggcgaacttttgtgaaacggtaagagttaaaccgatggtcaaccaggtcgagttgcatccctattttgcccaaccagaggcgctggcaaccatgaagtattataacgtgcagcctgaagcatgggctccgttaggtgg

SEQ ID NO: 921 - DNA, 48715 bp, Escherichia coli
ctttcatgcatccttgcgaatccttatgttatttttattcaacaggttagcgtgaaaactcttcccggtgcattttgattttaccctctgcatcgggaaaaattggtggtcaaatctggggtcaggttagttcgataatggagtgacccccatatgtcccttaacgacgcaaaaatccgtagtctcaagcccactgataaaccctttaaagtctccgattcccacggtctgtatctgctggtcaaaccaggcggttcccgtctctggtatcttaaataccgtattaatggcaaagaatcccgtattgcactgggtgcctaccctgccgtctccctgtctgacgcccgccagcagcgcgaaggcatccgtaagatgctggcgctgaacatcaacccggcgcagcaacgtgccgctgaacgcggctcgcgcatgcaggagaaaatgtttaaatccgtggcactggagtggcacagtagcaagaaaaaatggtcgcagaataccgcagatcgcgtgcttgcccgtctgaacagacatgtctttccgaccatcgggcatctaccagttaccgagcttaaatcacgtcatttcattgaattactgaaaggcattgaggaaaagggcttgcttgaagttgcgtcccgctcgcggcaacacctcagcaacattatgcgttatgctgttcatcaggggttaatcgaaatcaacccagctgcaaatcttgacggcgtgacggcttctcccgccagacgacattatcccaccctgccactggagcgccttcctgagctgcttgaacggattgacagttatcaccaaggacgggaactcaccaggcttgcagtcctgctgacgttgcatgtgttcattcgctcaagtgaactgcgctatgctcgttggacagagattaacttcagaaatcggatctggacgatacctgccacacgcgaagcgattgcaggcgtacgttattccagtcgaggtgccaaaatgcgtacaccgcatattgtgcccctttctgagcaggttatctctattctgaaaaggattaaggaaatatctggcgggtatgaactggtgttccccggctatcatgacccctacaagccgatgagtgaaaatactatcaataaggcacttcgccagatgggatacaacacgaaacaagatatctgcggtcatggtttccgggcaatggcgtgtagcgcgctgatggaatccggtttatggtcgcaagatgcagtggagcgtcagatgagtcaccaagagcgcaacactgtgcgtctggcttacattcataaggccgaacatatggaagcccgcatggacatgatgcagtggtggtcggattatctggatatgtgcagtgaaatctgggtgcccccgtacatctggagtcagcaaaacattaatctcgcagtaacctgacttatgaataatcttgtaaagaaccaggccgtatcagcaaacgctgatacggcttttcatccacaggccgtttttcatcttctaagtcgtccaggacatcatggttcttaatacacatgcgttcgcatgtgcttatgttaagtagacttattgtcttacacattttatccgtatcattaaccagaatatgttccggagcagcgggtgatagtgccgccagtccacactcatcgctgcccggaaaaatcatcagtggggaggcaaacggtaagcaccccgctattctgcaagacatttctgcagtttatttaacctccccgaagcatttttataaggcgaggcggtattaaattgaatcatacgacctcgggtccatttattataccaaggtttaccgtaaagctcatcgttactgaatcgttcaatcaaagccacgagttgctgcttattttcctttaaccgtgccaataaaacttcgtactctgtaatatcctcatagtcacggtagaatttctgtgctaaacgccccaattcattccatttaaatccttcctcaggaaaaataatagtttttccttttgcctcttggtcatgccagtgtaacaccagctctccccagccaatcagataggaaaccagattcgctacgctaatcgtagtccccttcgcgtgcccttccaatagaggttcaaaggcgagttggggcgtaatagattctagcttcttatttaataaagaaaaattactattaatagctttaattaactcttcttttgatgatggaacagccatatctattgctccttgtatagttacacaactatttctaccctactatttcgagtgattcaatcgtctggttcacataacctaccacctgttcaaaatgcttatcgacaaaaaaatgatcggcagcaggaaatataatagtccgcgtctttcgtgtggtgaatttttcccatgcaagtaattcatcctgcattaccagattgtcagcatcgccatgaaatagcacgatcggacaggttaatgtgcgcgccttggcctgaaatacatactgctcatagagccgataatcgtttttaatgatgggggtgaaaattgtcattaactctttattacgaaagacatcaaccggagttccgcccagcttgacgatctcttccataaacgcctgatcgggcaaggtatgcagtattacttcatgagaggcccgatcgggtgggcgacagccggaaaaaaacagcgcgcatggcatgtcatgtccatgatcgagaatataatgcaccagttcgaaggccatgatccctccgagactatgcccaaaaatggcgtagtctccacctgtgtagtgtttcacaaattgttgataaaggtcagcgacggcatccaccatcgtaagacacagcggctggcgtattctagttcccctccccgcaggttctaaaggccgcaaagtaatattgtccgacagcacgctacgccatttataatacatggcggcagaaccacctgaatatggcaaacaatacaaactgatattactcatcgtcccactccttgttgtgtaatagaattcgtttaatttgatgatttaatgtcagaacgaaagctaacaggataattccgaacggtatcgccaacacgctcgatggaccccataccaagataaaacgccagtcaagtcctggagatagtatacccggtgcgacatagagcatggcggccacgagcccaggaaccgccaaggcgatgatatagtcacgtacgcgtaaacgtaacctctgctgttttccagggccatgcgccgttgcgcgataaacacggaaagcaccgcgcactacaaccaccgccccccaaaaacacagcaacaacgtgaggtagacgaaaagggtatcggtggctgtaattgcatcaccagcgccgtcagcatatttgccaatgcgcagataattatcgatatccgcgcaaagctgtagtatcagattcgaattcatatttgccagcgcaacaatgccaatctgctgatccggtcgcaacgcaatgcaagaagaaaagtttggattctgcccaccgtgactgatgtaagggccttgattctggtcgataaaccaaccgctggcatagaggatacgattgtctgcggcaagcggaacatcactattaccacgccaactgttactcatcgcctcacgcagcgttgccggcaaagcctttctgtgcaaccaggcgtctatccatatttccatatcaggcagagtgctatggatataggcggcaggaacatggttccgggccagaggcgcatgaaacagaacgggtttgccgaatcccagtttatagccgcttgccttgttgacaataatctcatcccccttaactgccacagtcgccgacatgcccagcggctgcgtgagtcgttccgcaatgacctctgtaaaggtttttcccgtcacattttcaatcaccgcgcccaacacatcataattggcggaggcatagctaaacttcgcacccggcgcaaacagcagattctcgttgcgcagttgctgtgccacagcgctcccaggcatagggttttccagccgagccagtgttgaaaaaggcaatcctgatgtatgataaaggaaatcagccacggtcagggaagcaggttttccctgataattcaagcgcatttccggcagataggtaatgatatcatccccttgccggagtctgccttcctgaatcagtatttgcaccacaagtccggtaaacgccttactcatcgatcccagctcgtaaactgtgtctagagtattcgctttctgactagccacatcggcaacaccgtagacaaatcgctgacgtacccccttaatggtcacacttacggaaagggctgggaccttggcctcctgcatccgttggtgaattaatgtcgacaggcgctcatcttgcgccccgataggctcatgttcttgcgccaaagcgcacatagcggaaataaagagcagcatacagcacaggagatgatataatgttttaatgctaacgtgttccattattgtcatcctgtgaacacctcataaaataccatcaacacattcggagataaattcactgtgctcacggatagcgggtctggcataaatatcggcggcagtcagtccgattttataaatgtggttacagctgtcgacgaaagagataacgtgcatcgaggtcgctccgtattcgaaaataaccgcgtgttcgtcataatgatcgatgcataacaatgaacgccaggttttctccacaaagtcgctgaccgacaaataactcactggtaacatagcgttctctctcgcatcactggactgaatttcataccggacgcgatcaaacgaataaccgggtaagcctatagtctgcacggctggcatttccggtaaacaaatagtcactcctcgttgccaaagagtgcccaacagcggcaggatgtcctcaggcgtatccgtattcagcatgggggaaaatactgtttgcccaacccactgcgcatgctggtgatacaatatggaaaacgtccccgcgcgaccgatttccagcatcagcgttccctccgtcaccgccagattagccaatatttcgctcagttcactgttgccggccagcgtctgctccggtgtcgtttcagccacaatcacctgctgaacagcgttttccagtgagatgatgcgcgcaacatactgcgctgctgcagcccccgtcaggtaaccgatgtgctgcacaggcgagatactttgttcgatcagccattcactaagactcacctgctggataaactgacgcaatgctggcgtccaatcggctggttcgcagatttgtgcaacatcctgagacaggcgctggtgccgctggcgcaagttaggttgacaagccagcaaatgcgtcagggcactctccagcttatcgtcccggtccggatataggaacaccaaggtagtttccatattgataggggtaaaagacatgtcagcatcccgcagtttcgccaaacttgcacgcaacgctaccacactgtctgccgccagcgcacagcgatacgggaaatgtgcccggcgttgcgcgagagtataggcgatacgatctttatctgcttccgcataggtcgccagagcgtgataatgagcatccaactgttgtctaagggctaatggcgttttggcgctgaagaaaaacaggcggcgctcattttcttgcaccgcttgcgcaggcgtctcgcaccagttttgcagaaccaaatgagcattggtccctcccagcccaaacgaactaacggtggcatggatccttttcgtttgtgggacagaagtcactacatcactgagataaaatggcgaggctggctgcaacagttttttatgtttatttactaggttgatctgcgggggaactaaaccagtatatagcgtcagtgcggttttcattaagctgacgataccggaagcgactcccaggtgacccaagttggcttttaccgcacccaattgaatgctgtgcggcgcacatgccggtgcgaaaacccggtgcagagcttcaagctcaatctcatcacccaacggggtaccggtaccgtgcgtttcgatcagtgcgatatcagtcggtacgacttctgcggcggcaagcgccgtattgatcgcttctacctgtccttctacgctgggggcgacaaaccccagccgacgcccgccgtcgttatttaccgcacctcctttaatcaccgcatacactctgtcttggtcgcgtagtgcatcctcaagacgttttagcaccacaactcccgcaccgctgctgtataccgtgccggtcgcctcagcgctaaacggggcgcagtgtccgtcttgcgataccagcttatcaccttgcggactgtagccgtgcgcctgtaaaaaacccaaggtgaccccacctgccaacgcaacatcggcttgaaaagtcaataacccctcgcatgctaaatatgctgccaccaacgaactggaacaggcggtctgtacactcacagcgggtccggtaaaccccaacttgtaggcaacctgagcacacaagtaatccttttcgttaccaatctgcgcctgaagataatggtgatcgccgctcatcttcaggtatggatagacgcgatcgataaaatagttattggcgtaggtcgccccatagacgccgactcgcttaagttgcgtgggaatatagcccgcatgctcaagagcgttgtagcagcattcaagaaatattcgttgttgcggatccatcaacagggcttcgccaggcggaatattgaaaaatgcagcatcgaagtcatagggagcggtgattatattgcgcagcctaatccaagggttcccattatcgtcttctgtgcatgtcggttgagtgaactcctcacccgccagcaacttatcccaccactcgggcaccgattccgcaccggaaaaacgcccgctcatgccaataatggcaatatccagtgagccacaggtaaaatcatcctttgccattgttgtattccttaagggttggcatcgtgtttatagtgtccacaaagtcggcgcgcccgtcagcgtggcgctgtgttggcacagccaggcatccagatcagtgaggctgttcttgtagcgcgccagcaggagttgcacatcattcagcgcaatgcgcgtgggatcgaaacggcagtggaaggagagaccatcagctgccgagcgcgcaatattaaactccagcacgcagccgagcgcgttttcaggcgcggtatagatatcactattaaagtgatcaatatgaaaatagcggagtgaaggttgcgcctgcacaccgatgtaattcattcggatcccttgcgcaagagagtcttccggtgcatgccgcatttgcagcagaccgtaatctcccccaccatgcgtgcgttttgccaaatcggaagcgatcgcagataacagtgtcgccatatcgccatgcagagggatcgcccaaggataaaatagagtaaaccacccgaccgtatccgcaacgtcaggctcatcgggccagcagccgcgtcccatgccttccatctcgatgcgacaccaaggctcttcgctgtagtaacgcagcaccagcgccaatgccgttagcacataggtttcggcgctgtacgcggtattaccactggattcaaacaacctcctgacgcaaggatggcgaaagtcttcacgccaagcgcgcgtacgaggtaatgagtcatctggcaatgacacgggtgggaaatgcagcggtagcgtttgacatactgtgcgccagctttcgtgtgtggcggaatctaccgttttgctcgccagatagtcattccagcgatgcagtccgctgttgctggtgccattgacagtgctgacggcgtccagcgtgctgaggattaaataccaagagtgcatatcgacgcacaagtgatgggcacagagtaccagcgtgctagacgcaggctgcggggcgtgtaacagagctgccgtaaagactcgaccatttgtcacgtcaagcatgctattgcactgagcgatcacctctgccaacgtccactgcgccgtcgaatattccgtgagcacctcgttgggataacacacattagggtcgcatactagcaaccgcccctcagcgtccagcgcactgtgcaaagctggctgctgctggattaatgtatgcagcctgttgtgtaactgctcgagcgggcaagcccggcaacactttcagcacaatgacatggttataaacattgggcactggcaacgccaactgcgtaaaccaacgcaatgcgggtagatcgatacgggtgttatgagcatactgcgcgagctgtgacaccgttgtatgactagcgagaaactcacagatggcgttcactgttccacactccatcacctgcaccgctgacatcgtccagccgtggtgcctgagctgcgctgcaatctggatactcttgatggagtccaaccccaagacataaagattttcgttatcatcaaactcagtttgctccagcgccccttccacacatacccgaactgaatgccttatcgccgcatctcccagccgctcgctacccgatgcaggcgcggtgtttcggaccgttgcgaccatctgacgcacgtccaccttgccattgtgcgacagcggcagttgggcgatagcacagcactgcttgggttgcatgtaggtgggtaattgctgacgcagatgttgcattacggtagctacatcaacagatgacggtgtcacgcaggctagcaacccgctgtgctgcccctgcacatcatcaatcaccgccaccgccgcactttctacctgaggtgcgctcaacaacgcttgttcgatttcgcacagctcaatacgatagccattaattttgacctgatcgtctttacgtccctgataaaccagcgtattaggagcgatggcgtagccaatatcaccgctgcgatagccaatcatcaccccattggtatctttaaggtaggcggcggccgtttgttgcggcgcatcgatatagccctgcgtcactgacgcgccataaatcaccaattcaccagtttcgccttccggtaccggacagccccaaggggagcaaattgctacctggcaaccgtcgatcgccataccgatgggcaatgaaggcagcgtttcttgcccggtgtagcgatagatcatgcaaccaacggtggcctctgtcggcccatattcgttatagatcacggcctgaggaaagagagcagccgccttacgcgccagatcccgcttgaaatcctccccgccaaccaccaaggtacgaatctgctcactgcttatgccagccgcacacaacaaccgcaggtgtgcaggcgtcagtttgatcactgtgttgggctgatcaaccacggccatgcgcagcaatgtttcgctctcggcgtgccgacaaacgctgatgctagcgcccacacataagggggcgaacagcgtagtgatggtcaaatcgaaggacagcgaagagtagagcgcagcccggtcctgcgctgtaaagtaacgttcggcggcgaaatggagatagttagccagattgccatgagagacttgcacgcccttaggctcgccggtcgatccggaggtaaacagcacatatgccagatcctgcggttcaatagctggccaaggttctctagcaagcgccgaagtggctaaggcctggagcaagctggacgcgggaaacgccagcgcctgcgtcaattcatgcatcgccggatcgtaaaggatatgcgctacctgcgctttacgacacatggcgtaaaggcgggtcgttggcaacgcgggatttagcggcagaaatgccgcgccgcagcgcaaaataccataaataaccatcaccgtttgagcgctatgctcagcgataatcccaaccacttgaccgcgtccgatcccctgttggcgcagataacgcgcaacccgctcaacagcgtcatccaactgccgataagtcaaagactgttcattatcaattagtgctgtgcgatcaccatgctccacaacttgcgctgcaaatcgggaagtaaatgagggtttgagtgagccacatgccaatgcgacgtgcggcgcaggatagacttcgagatcgcctagacgagcgtcaggttgccgatccaatgcagtgactaaatccaacagcccatttttcatcgctgtcagttggtgcggagtgaaagcgctacgcagcgcctccagactcaacctaaggctttctttatgattattaacagtttgcaaaacaatctgtagcttataggactgctcgccgctgtagtaactctccacgcgttgcgcggcacctgcaatgtggcgttcataggtaaagttataataattaacgcaataatcgaacgcccgcaacttccctcccccctgttccgccaaatcctggttgaataaggtaatgggatatttgctgtgtttaaaaccgcgtttcagttcgcgctggaaaaaggccacccgttcacagaatcgttccgtgcgcaccagtcgataggccagcggcaattgattagtaaacatgccaaagcaacgccgcgcctcgcgagtatgccgattggctaacggcacgcctattacgcctttttcctccccccatactctggcgcgatagagagcgaagagtgcaataaacagcgtattaagcgtacagccataacgattacacaacctgtagagacggttaatcatggctggctcaagccaagtggaacaactgatgccctcagtagtaacgatgggggaactgtctggaaagcagtcgcggtattcgtcgatatagtcacgccaccagccacgatcaacggcaaagcgcgttgacgcctgataagattgctgctgcgccagaaatgcgctataggctggtgacgcatcatctggtacgtcctgctgttcgtatgctcgcttgacatggtttgacaacaacgccattgaccaaccatcagcaatgccgtgatgggctttaaataaataaccgctgtattgttcaccgcacgtaaaggtgacaaactcgaacaaatcgtgcgccagcagggtaaagggctgccggaaccactcatcaacaaatgtttcgatcgccgctgggcgtaggttctccttgtcataatctggggaaaaagtcaaatggcggatatcgcgccagtgataaggctgcacttggctgaccacttcactctcctctcccatcacaaaccacatacgcaacgcatcaaattgccgaatggcggactggatggccgcgtgtagtcggggcagatcgacaattccctcaatggtgaccacaccaccaatgatgtttacggcactgtaaggatacagttgatcaatgatgtggcactgttcctgtggccacgacaacggattgcccgacatcatggtgccacctccatatccaagtgttgggagcgcaccgcctcctgattccatcgcagcagacgaggtgaaagacgcagcagacgccacgccaacaacgcagccacaaaagtgccgctcatcgccccaaaatagacgccggtaatacgcatctctaacacaatcgccagcaggtatacgacagggacagatataaacacgtgacgcatcagcgtcaacaacaccgaataccaaggcttaccaatggcctgataatattcacttgctaacaggctgatagcgacaaagggtagtgccagtgccatgatacgggtttgcagtaccgcatagtcactcacggcaacaacacgagtaaacaggggatacatccagggtgccagtacaatatgcataacggctaacaccagcacaatagagaaggccagcgcgacggcggcccaataggcattcagcgtgcgggtgacatttccgtgtccccagttttgccccaccacagtcagcaacgcggtcgcgatagccagcatcggcgtgatgatgaaatagtcgatgcgaccagtgagcgtaaacgctgccatcgcgtttacgtccagcctgacgataaaaaaattataaatcactatgccgaccgcaatgatcagttgcatcagcatctgcgccatgccgacggagagaaactctcggtagattttccaggagaatgggcgtaacgcgatgcgtatactcaacccgatatgtaatcccatcaatgtgtagatgaaataggcgaccatactcagttgcgccagaaacgacgccaatgccacccctttcacaccaaaatcgaatacaaagatcatgattggatcgagcataatatttaccaacgcccccaacaatgaggccttcatgatgaccatgatcttacccgcgccttgaaacagccccatcatgacgccaatcaacatgatgctgaacacggtcagcagcgaataataatagaactccgttgcgtagccgatgatgctcttcgtggcccccagtgagcgcaatagcggctgggcataaacatagccaagtacggtgatcacgatcgcaaagaatagcgcgatgatgataccgaccgacaaaatccgctgtgcacgatccaaccgctgcatgccgatggcgcgggacagcaaagatcccataccgatttgaatgccgttggcgatggcaaataaccccattccaacggggaaaaccagccccacaccggcaatgatgccgctgttggtgacatcaatgtggctcagccaaaaaatatcggcgatggcataggtcacctgcgttaacataccgacaaacatcggcaacgccatgcgcaggagtaatttatacagcgagccgtcaaacatacccgccaccgtgaacagctcatcgttcggcgtgccgttgtctggctcaagcttattcaccgtcatacctgctccttattcattaaatgcgccgcacctttattggcgctgtcaccgatatccgcctctagtacccttccggtaccgtgaatccgccactgatgctttcgcagaactcagcaaagttaatcgtcacatcatcgtgaaaatgcccggaaatgatctgtatgccgcacggaagctcatccatcgttttcgccaatgggtaaacggtggcaggcaaaccaaaaaccgttgctaacatgttccagaacaaatgttcgttgtaatcttgcggttcgccattgacgataagcttgcgcttacgcaccggctgctgcatgtgcgcaaacgccagcaccgggctgacaggtgtcaacaacacgtcataacgcgcgaaaagggtttctatcacccggctgtattcgtggcggagtttgtctgtattccgctgttcgccactgtctttcagcatgccctggtaatagctcgttatcccctcaggcacatccgccagcttgcccacaagcctgaagcccagcgcagccagcccggctgtaagacgctggcgtccattgagcgccgtacttaccagccgaccactgagtttgactgctatatcaaacagtgcgtcgggatcgatatcggcgggcatagcatcatcaacctccacgccaggctgtgcgcgtaacttgtcgataaacgattgaaaacgctgtgcgatctgttgatctatctcatggtggggcgcactaaaccacgtgcacacgcggtagtttgctttggcctgataacggctaaaatcgggaatacgcggcggttccacccagaatgtgctcaatgcgcgcatcatcagacgcagatccgccgcgctgcgcgccatggggcccgccgtcgagagatccggctcatcagtcgcttgcggaccaccaccgggcacatgtcctctgaccgacatcaaccccaagctacaacgatgggcatagacacctgtgtagtgtgcgggaatgcgcagtgagccaaacaaatcgctgccaaattccacgggggtgaaatccgccgccaccgccaccgccgctcctccggacgatccgccgggtgaacgttgcctatcccacaggttatgggtggtgccatacagatcgttataggtttgccaatcggcagtcatcatcggcacattggtttttcccatcaggatcgccccggcagcgcgtaagcgtgcgatggaaggagcatcctgcgtcgcccggttatctttcagataatgggcaccggacgtggttaaccacccttgcacgtcaaacgactccttaacagtacaaggtaatccgtgcaacacgccccttgcgcgcccctccagtcgctcacgatcggcgcgcgcggcggcctccaacgccaacgcatagtgctgctgcaccaccgcattcaacggcttgttaaactgcgccatacgtgaaaaatagtgattcaccaacgccactgaggtggtttctccggacgccaactgtgccaacagtgtccctgcgctacgatagctctgctcactcatcgcccttttctccctgttgggcacgtttacgccgcaacgccagattctcgcgcgcagcgctgacctgcgaaacctcagcctgcgctaatacgatatcgtgggcggcgggtagattgtgcagttgctcatcaaggtaacgcgccacatccgcgatggttggcagacggaacagatcgacaatgggaatctcctgcccgataatcgcctcaagtgcctgctgaatacgcaccaattctatagaactgccccccagcgagaagaaatcgtcttcggccgacacgtggctcacgccgagtacctcctgccagagcgccaccagccgctgttgtaacgcactgtccacctggattggacccacgccgtcacgctggtgggcaatttgttcgccctgcagctgtaatttttgccgatctagcttgccgttagcggttaacggaaaatcggtcgctaacatcagatcactcggcaccatatagtcaggcagttgctgacgcaggccgcgcagcatggcatctttgtagctctgcatgtccagcggcgcagcggtttccttcggtttctcataggtggagaaatcgcgcagcaatgctgcagcacttgccgcctcttgccctatcgcgccccccacggtgcaatggacatagcgatgatgtggcgacaattgaaaatgcgatgccacagcggaaaagtctgccatcccaagttggcacagccccaatccgtagcgcggcgcatcttcttccagtaaatggcagagagtacctgcttccatcaccgagaagtgccaagctgcctcttgcccatagaatggcgagatcaccgccatatcagccaccataaacagcgtgaatgccgcccgatcggcaatagactgattaggtccggcatgaaaaccactgttcagctcgacttctggtgctaccggcataagacagctctgtcgcgggtcgaagtagtaaataccggatactccctcttcgatcttgtctggatgcaggtacacgtaggtttgcaccgggtatagccccccggcggacgcataggcatacttggcaaaaggtagaccgggtagacgcatctgccccaagcccgacagcaattgccccaactgtgccagcgtggttttttgcgcgctgaaatgacgatagctgcggcgtttgatgtaacgtgtgctatccgccggtgccgtcagtgcaatgcccagaccatccagcgcgcgaatatgtggctccttgagtttgaacgctagacgctgtgccggattcacaataataccctgcgccagtgccgccgcctccgcttccttagcttgcaatgcctgcgcctggtggcgatcgtgcagtttggcaaaagcgaccagccgacgatgttgagaattacccactgccaccaccactgactgctccacatcgggatgtcgcgcaatgcagcgctcgatttcccccagttcgatacggtaaccattcaccttcacttgggtatcgttgcgccccaaaaaggcgacttgcccgtcagcaaagtagcgcccgcgatccccagtgcggtaaattcgctcaccactcgcttcgcgccagacaaagctcgccgccgttttctctgcgtcgttcaggtagccttgtgccagccccatcccgccaatgcaaatctctccttccaccccgaccggacattcctccagttgcgcatttagcacgtatactggctggttgcgcaggccccgaccgtagggaatactggtccacgtcgattccacctcacctatcgggtagtagaccgaccagatggcgcactcggtcgctccacccagactgatgatgtccatcgtttcattgagccgctcgcgcatctgctccggtaacgttagcgggatccagtcgccgctcaacagtgccagacgcaacgtcggataactcatccgatcgccgctgtggtattcgcacagcatctgcatcagtgcgggcactgcattccagacgcttacatgaccgtgtgccataactgtctgccaatgacgcggatctttttcccgtcctgcttccggcagtaccagcgctgcacccaccataaaaggcgcaaaggcatcgtaaaccgacaggtcaaagctcaatgatgacagcccgaacaccctatcctgcgcattgaggccaaagcgttcgttgatgtcttccagcgtgttcatggccgcacggtggtcgatcatcactcctttcggggtaccggtggagccggaagtgaaaatgatataggccagatccgtgacatccccagccacttcaggcaacggcgcagcaggcgtgtccagcattccgtcgtcgatgatcagcacgggcagcgacggctccaattgcgtgagacccggctgcgttacttgtacccgcacctcgcccaccgtcagcaaaagctggcgacgctgtggcggtagcaccggatccactggcagatagaccgcacccagtcgtaaaatgccgtgtacggcggcaatctgctgccagcctttttccatcaccaccgccacgcggtcgccatgctgcacgcccagcgctaacagggcgcgggccacatgatccgccgccgtcgacagttggcgataggtcaattcacggataggactgatcagcgcagtttcctgtggcgtcagtgctgcctgacgcagtaatccatggtgcaacaaggccgtaggtgcaggagcctgcgtgaccggtgcactaacggtgggcagcgccagagaactatttaccccccaccaactttgcggcatggcaaccagcgcctgcagcgcatgacaataagcaccaaacatctgatccagcagcgtggtatcaaacagttgctcgaccgcgtcccagttgaaatgcaactccccagccaactcgatcacctggtgatcgagccacacctgcggtgtttgggtaatattggcgtccggacacagagtaaaacgggttgtgtcccgagggtcttgcgcagtcgtctccccgtcgatatccaacatactagtgaataccaccggcatcggcgcatggaaacgaccgctatggatcagcgcctcgctggcgcggatcccactgaaacgacgatgttcgagatcttcccacagttgcacctgaatacgctgagcgttgtgggcataagagtgctggctgtcgtaacaaacattcagcaagctgacagcggtaaaatcaccaataactgcctctgcgttggggtaaccctgcgggcggttgaacaacgtcagattgagcgtaaacgtcgggctaaggctccaacgtgccagcacttggctaaagactgtcaacaacaatgccgtcttggtgatacgtgtgcgttgggccagcgcgctcagcactccccagttgtgggctgacagccgatgacggcgacgtacgaacctgatcgcagacagttgcgccaaatcgccctgtacgggcagcgttggtgggccatacagctgcggcagcgcccgttgccaataggcctgatcgcgtgcataggcttcactcgcctgctctaccaacagcgcctgcacgtagtcacgaaaagagaacggtagcaacggcagtgacacatggggctcacggtacagcatcatcaactcctgctgtagcgtgcgcatactcagagcatcggcaatcagcagatcgagactgaaatgcaagcggccatgttgcgccgtgcaagccgaataactgaaatcaaacagcggccaacgatctgcgggatgcacatgatgcgacagccgatcgcggatcgccatcaaggcatcgtttcgtgcgttaggggacaaagcactcagatcgcgctgctctaactgatacgccggcacttgcgccagaatctgctgagtaccgtcggggagtacccgcgcacgtagcatttcatggcgagcgatcagcgcattcaccgcatgggtaaaacgcgtaacattaaagtgttctacgtcaaattcatggtagatgtgggtcgcgatcgaggtagcacccgtctgtcgtccaagccagtaggcgcgctgaacatccgtcaatgggaacggttgatgacgatgctcagggtcgtgcactatcacccagtcatcctgagacgcggcagcgtccgtgatagattgctgtgcaatacgcgcactcagtgcccgtagtgtggagtagtggaaaatgtccttcagggtcaaggcgcagtgaaaagtgcggttgatctctgctaccaacgttaccgccaacagcgaatgtccccccaagcgaaagaaatcgcactcaggatcgacgttttttatcggcaaatagcgcatccacagcgccagcaacatctgttccgtgtcgctcagcgcttgcgtctgcggcgacacaagggagctatcggcaacgaaattttccgctaaccgcttacgatcgattttaccgttgtcagtgttcgggaagtcggccaccctctgccacagcgttggcaccatatagtctggcagttgctgccgaagctcgtttttcagttgctcgaatagcgagggaggctcactggtgatgatgaatgctgccagtgctttgtgtaacggtgctctttcaatacaggccaccaccgcggcgtccacatgcggatgccgtgccaacgtccgttcaatttcgcctaactcaatacgataaccgcgcagtttgatctggctatctttgcgcccaacaaaaaacaactgcccctgcgcatcactcctgaccagatcgccagtgcggaacatcctgccaccggggacccctggttctgacaagaagaactgtgcgttcaactcaggctgcccatcatacccttgcgccacaccatccccggcgatgtaaagctcgccgtcaacgccttgcggcactggatggccctcattgtccagaatgtatatacgggtattggcaatgggagcgccgagggtgatgttttccgcttgggttatctgcgatttcagcgaccaaatggttgtttcggtgggaccgtagaggttccacaatgaaccacaacagcgcaacagttcttccgccactttcgttggcagcgcttcaccggcctgccagcacacatagttccgggtcgccacgccaacccgccatcaacagcccgtgccagaacgagggcgtcgcctgcatcagcgttggtcgatagtcggcaatcagcggaatcatacggaagctgtctgcggcgcgttccgcctctgtcagatagagactcgcaccggagatcagcggcaacagatactccaagaatgagatatcaaatgttggcgtcgtcaccgagagcagccgtcttgcgagccaaccgcaaggtcgctgatatcacaacaagttaagcaacccgcggtgaacaacgcacacgcctttaggttcaccggtactgccggaggtaaacaacaggtaggcctgcatatccggcaacagcgcgcaaggtgtagaataccggatcgcattcgacatgtcctgcatcaattccggcaacgacagttgtacaatttcaccccactctcccggctgacggaccaccagacagaccaaacgcgcgcgttgcataaggcgttgcaaacgcgcggcaggctgatgaatatcgaacggcacgtagcacgcccccacaaaccacgtcgccaacatggttgcaatcacatccctgtgacgtggcaacagcacgccaatacgatcgcccggttgtatgccatgcgctcgaaaacgcatcgcgatgaactgcacacgcgcccagagctcagcgtaggtcagtgtgccgtcatgctgctgtattgccagttgctttgggtgctgcacacagcgctgttcaatgatacgcagcacatcctgcggcccgagccacgggacgttagtggcgttgagcggatcacgccgcggcgttgcggtctccggtgcatgcagagggatcgcccctatcggggtctccagtgatgatgtcaacgataagcagtgctgacgcagcgcctcggcaatctgcttcaccacatcagcatcgtataaccccaaatcgtactcaaaggagacgtcgaacgtggcgtcgttttggaacacctcgactgtcatgtcgtatttgacggtctgattgtgatacgtcacctgctcccaatacgcaccagccaaggtaaaagcgcgtggggtcacgtggttatggtagatatagaggatctggaacaacggtgaatgggaaaggctgcgagggagatccagcatattcaccaagttttcaaacggcagttgctggcgcccctgcgtctctttcacgctggccttcacacgctggagcgcctcgcgccctacctcaaccccattaaaatcggtgtagataaccgcagtgctggcataataaccaatgctactctgcaattccgggcgaatgcgccccgatactggcatgcctatcaccaatcgctgttgctgagcgtaacgcatcagcaccagttggaaggcagtcagcatcagcacgaacggcgttgtttcctgcgtgcgggctacgtgtttcaacgcgaggcttaatgtttcatccagggtgatgctgaaccgggaaccatgtgtagagggttgtgccgggcgcgggtgcagcgatggaaatgtcgacagcagaggcgcgtcttgcaaacgcgcacgccagtaggcaagttcgttcgccagcaaggtatcctggaaccattcgcgctgccagaaggcataatcggcatattgcagcggcggcggaggcagcgacgtttcattaccagcatgcaatcgagcatactgctgctgtaactcatcgaacaatagccgtaacgagataccgtcgatgatgatatggtgcgcgcaaaacaccaaatgacaaccttgatcgggttgaataatctgagttaccccccacagaggaccgcgtgccagatcgaaccgggtgtttatcacctgctgaattaccgcatctagcgctgaagttggggcctgcgctgccagcgtgaccgtatcgagaactaacgaagacgcatcatctatcacctggcaaggccgatcgttacgtactatgatacgggtacgcaagatggcgtggcgtgcttgcacatggcgcaatgcctccgtgagcatcggcatatccaccacgccatgcaaacgatacaccacataaaggttgtagttagtggcggtactgtcgtatttttgcaaaaaccacaaccgctcctgattaaacgacagcgggattgcctgcgccggatccgctttgatgatgggaatgcggctgggcgacacgcctgattgcgccaactgtcgtaatagcttttcctttttttccgccggtaacattcgcgccaatgcggcatgatgtatcgtcatgaccgtcctttccttttcgctgtgttaaatacttttgccaacgtcactcattaatcatgtcgttaactagcacggcaagtgcggaccctccatcatcctgctgctcctgctcgaccaactgcgctaacgcgcgcacgctggcatcctccatcacgtcgaaaaaggaaagagtgacggcgaaccgttcctgtacctgcgccagcaacatgcccagcatcaatgaatgtccgccagcttcgaagaagttgtcgtcaatgcccaagccgtcaattcccagcaatgcttcacaaatcgccactaagccgcgctgcgttttgctctctggagccgcgtaaggcaccgaaaacgccggacgcggctgacggcgcaccgacggttcgctagggatgacacttcccgcgtccgccaccggcgttacggcgctcctctgttcttctggactgtcgacccagtaacggattttgtcaaaggcgtaggtcggtagagagacacggcgcggttgctcacctgcaaacgcagacaaatcgatgttatgccctcgcacccaaagcgctgccacggtatctaagatatgtttgtgctcatcgctgctgcgggcacctgctggcagcgagctgaacgcgagacgatcacctaatgcatgaccgttggtcagctgggtcagggtggcacctggcccgatttccagaaaatcgacatcaaatgtagcttgcgcctcttgcagtgcagcggagaactgcacaggcatcagcatctgttcaatccagtagtccggtgtggtgagagtgtcggcactgacgtgcgcgccggttacggtagagatgatggtgagcgtcggcgggttcagtcgtacattctcaaatgcctgacgtagcgcctgcgccgcatcttgcatcatgctagagtggaaggcatgagaggtatgcaatcgtttgttgatgatgttctgctccgtcagacgctggctgacggcgaggatctccgacgtaggcccggcgataaccgaatagtcaggggcgttaacagcggcaatcgccagcggggcggtaatcagtgcgcgaatctgtgcttcgggcagcgccaccatcaacatggcaccgcttggtgcctgatgcatcagctctgctcgacgcgccaccaagcgcaacgcatcctctaaagagaacacgcctgccaacgtcgctgccacccattcgcccagcgaatgaccaatcattaccgttggcgtgattccccaactgagccacaattgggctaaggcatactcgacgctgaacagcagcggttgtgtgaggcaggtttgcgcaaggcgttcgccttgggctaacgagacttctgctctgaacaactcatggcggatatccagttggtattcacgctcgagtaacgtcgcgcaacggtcgaaggcatcggcgtaggccggccaaacctgatagagctgatggcccatgcgctgatattggctaccctgcccggaaaacaacagccccagcccgagctgtgtctgcgctacaccacgagcaaacggcgctgtcgcggcctgctgcaacagcgtcccggcagcatgtagatctctggttacgagcgcggcgcgatgtgcgaaggctttacgtccctgtgagagtgtccacgccagatcccgcctatccggcagcgattcatgttgcagaaaatcggcaaaacgcgccagccccgaggataaggcactgtcggtcttggcagaaaacggcaaaatactgtaggcaggtacaggcgctcgcgcttgcaagtcaacggctggcgcttgttccagcacaacatgggcattggtgccgcccatgccaagcgaggtgacgcccgcgcgacggatgccgctttccggttgccacggttgacaggtagtgttgatgtaaaacggactattggtcagatcgatctgtgcattgggccgttcaaagtgcaatgttgcgggaattattccctgctgcactgccagcgcggtttttatcaaccctgcgacgcccgctgccgtatccaaatggccgatattggtttttaccgaccccagcgcacagtactgcttttgtgacgcgcccgcaaaggcttggcttagcgcagaaaactcaaccggatcgcccaaacgcgtaccggtaccgtgggcttccacataagtgatatcctgcggtgtcaaacctgccaaccgctgtgcctgagcaatggcgcgcgcttgggcatccacgctcggcgcggtataactgatcttctccgaaccgtcgttgttgacggcaaatcctttgatgaccgcatagatgttatcgccatcacgcagcgcttcatcaacacggctttaacaccaccagccccgcgccggtgccgggcacaaatccgctgctgttatcggaaaacgcccgacagtggccatcggcggcggtgatcccaccttcctgcgacaagtagccggtttttgctggtggccccagcgttactccgccagcaatcgccatgtcacactgccaagtcaacagactttggcatgccacgcacaccgccaccaaggatgtcgatgaggaagtctgcaccgtgatcgccgggccgcgcaggttgaggtgataggcgatggtagtagtgatactgtctttgtcgttaccaatggccgcctgcaaactgccagaagagaaaacgcgtttaaagtgcggcatcaagttcagcatcaaataggaatccatgcttttgccagcaaaaatacccacatcccccggataatcggcagccacatagcccgcatcttcgaaggctgcccacgcggtttccaacaggacacggtgctgaggatccatcagctccgcctctcggggtgcgataccgaagaaagcagcatcaaatttatcgatgtcagctacctcccctttggccttgacgtaatctgggtgctgaacaaattcaggactgattcccatcgccagcagttcctcatcgctgtaaaaggaaatgcactctcggcttgccagaagattttcccaaaacgcctgtaccgtatcggcttgagggaaacgccccgccatcccaatgatagctataccaaaatcattctctgccatgttgctttccccctatattcaggtttatcacgcgtttcattcagtggaatcagtgatgactgtcggttgtggctgcccagcgcgtgtgaccaaaggccaaacgctgcttcgccgcacgcagttgtgtctgatctcctgtggtcccttgcgctgcgtccggggccagcagaaattccgccaagcgtttgatggtagtgaagcgcagcaggtcaaccaacgccacgtgctgaccgcactgctgcccgatgtattgctgcatctgtactagcagaagtgagtgtccaccgagatcgaagaaatttgtggtggtgccgacacgctccaggccaagcaactgctgccagatctccgccagacgctgttccagttcggttgccggagggacatactcgcccggcccttccaactgccgcagatcgaccagcggcaggcactggggatcgattttgccgtttacacctagcggcatggcgctcagcggcacgtagagcaacggcagcatatgcaacggaagccgcaggctgagccatacgcgcaattgctgagcatccagcgcaacgccgttgacgctgcaatagaaggccactagtagcggcgttgccgccgcattgcgtcgcacatcgacccacgcatcagcaatatccggatgctgtttcagtaggctttcgatgtcgcccagttcaactcggtatccacggatctgcacttggcgatcttgtctgccgagatagaacaacatcccgtcggttgcccaacgagcacgatcgccagttttcagcacccgaacgccagggtattccggcaactcgacaaagcgctcgggatcctgtcgtgcatcaaggtagccgggcgaaatgcccagaccagagaaacagagttctccacaggcacctggcggtaccaaacgattatatgcatccaccacataagcttgggtgttctgaatcgggcggccaatgggcaatgctcccgtttcttgctccctacgctttgcgacaggaaagtaggtcgagcagataccgctttcggtcaggccataaccgttaaccactgccatgtgcggcagaagcggcgctatctgctcatactctaacgcttcaccaccgcacagaaacaagcgcagcgatcccatcgactgagccagcacagagaggctggcagaaagcgatggggtggtgctcaggatagtcacccgctgagatgccagcagcgcaatgagcgcatcactatccaaactctgcgctttttgcgccaatactaaggtaccgccagcggcgagcagcggcagtacctccccgacaaagctagcagacgcgactgaggtaatgggtagcagaacatcctgatgcgtcacttgatagctggatataaaggatgcggttaagttgaccagattacgttggctgagtcggacgcctttgggctgcccggtagtaccggaggtaaagatcaccaccgcatcgcaatctaaagcatctggcgcaacactaactggcaggttcggtatttctgtcagcaggctacgccagtcaggcactagcacccaaggtatcgtcagcccatgaggggattccagcggttgcgccaccagcagcatgcacggcgttgcctgcgccaagatcagggcattgcgggccgctggcgcgttaccatccagcggcacatagctcgcccccaaagagaggatcgccaattgtgcgataatcaattcgaaacaaaaaggcagttgcagtgcgacagattctccgcgttttacgccttgcgcacgcagccaagtacacatctgcatcgtggcctgttgcaattcgccataggtcatggcgtcgtcagcgtggcgcaaagccacctgtgtagggcgctgctggcagtgcggtaacactagcgccagcaggttatctacgggcggcagagcaacttcagtggcgttgtgccgcgccagccaagcgtgctctcgaggggtgaaacgaatcaaatcgcggactaactgcgtgggttggctgctggcctcatctagcagttctctccactgcgccaccaggtgctgaatacgatccgcactgtataacccagcgtcgtattcgaaagtgccggtgatgcgcccatcgatatgctgcatacttagcgaaatatccacctgagatgcactggtatccaacaataatggtgtaacgttgacaccgtttagtgtcgggctcgccagaggcatattgtcgagttggaacatgcactgatatattgggaaatgtccggcgctgcgatccacattcactgcgcgcactatgtcggtaaattcgagacgctggtgcctgaaagcggcaaacagaatacctctgatcgtctgtactaactcggaaaacgatgccgcttcgtcaagaggtaagcgcagcggtagtacgttgaccagcggcgcgatcatatgctcctgttctttcgtcagccgcgcagcaatcggcataccgacgatgtattcctgttgacgcgcattacgatgcagcaggaggacgaaggcggtcagcagatagttatacaacgacacgcgctgcgcacgcgccgccgccaacactcgctcgcatgtgttggcagacaatgcgaaggcaacaaacgcgccttggtaacgtgccaccttctgacgcggttgatcggtggggatatcaagaatcggcaacgtccccgccagggtattttgccagtaacgcatcgcgtcctgataggcgtcactctgacgccactcttcttggtactccatgtagtcggcatactccaacaacggttctggcgtcagcgattcaccgttatatgcggcctgcaattcgcgtaacaaaacgcctttcgaccagccatcactgatgatgtggtgcagatgaatcaacaatacgctacgatcgtcatcgagcgtcaacagttcaaaccggcacagcggtgtgcctgacgttaagggcatggggtgtgccgcacgctggttgatcatcgcctgtagcgcgttatcatcactcaccgaggggagtggcactatggtcagcaacgcctgcgacgatacgcactgaggcaccgccaatactggttgtccattgtgggtttccgccatagcacgtaacagagtatgccgactcatcaattgacgaatcgcgccgtccatccgcgtgcgatccagttctccttcaagcagcaaggcggtagggttattgtatagtgcagtatgcggcgccaattgttgcataaaccacatcgacgattgagccgatgacaacggtaggtagcgcacggcgggagtttcacgtaaatcgacgcgactggctgagtacgcccgcgccaagtcgagcaacgttttacgacagcacttgccattgtcggagagtggtaactctgacattgccaacaaacggttcggcagcatgtaggcaggcaagtttttggacagtgcgtccattaaggccgccaaattgagcggcacgctactgacgacaaaagcgtaaatcaactgattgtcgggatcatcctgatccgccaccacgactgcctgctgtacccccgggaaacgcatcgcatgggcttcgatttctcccaattcaacgcgcaaccctctaattttaatctgaaaatcattacggccaatgtaatgaatttgttggctttccccgtcgcgccacaccagatctccagttttatacagccgctccggtttccctaaatggcgcaaagttggatgtatagtaaaacagcgatcagttaacgccacgttgttgagatagccacgtgccagcccgataccagcgagatacagttcgccctcttcgccgtctgctaccggattaccatggtcatccagcacatagagtcggcaaccgtcaatcgcttgaccgatagggatatcgtcgtagtcgtacccgcgcaggcagcggtgatgactgacatcgattgctgcttcggtcgggccatagagatttataagatcaccctgcgccaccgattgataaaagcgagccacactgtggaccgtgagtttctcaccgctggaaaacactaatcgcaatgaggcggtcaaacgaggatcctgtttcatctccagatactcgacaaacaggttcagcatcgaagggacaaagtgcacaaccgacacgcggtgacgctgaatcagtcgagccaaggttcgcggatcgctctccagtccggacggtaacagcactacagatgcgccgtacatcgcccaccagaacatctcccagacagagacgtcaaaggtgtacaccgtcttctgaaacagcacgtcctgagaactgataggataagcgttctgcatccagacaattcggtttagcagcgctgcatgttccgtcgccacccctttagggacaccggtggaaccggaggtgtaaataatatacgccagttgccgcgcatgtggtcggtaacgcagatccgtcgttggcatggcactgaccgccgcgctgtcgatttcgacgcgaggaatcggccagcgatcaccatcgtcagtaccgatcagacaaacagcgccgctgttgctcagtatattttcaatgcggctacgcggtgcattgtacgccagcggtaaataggcaccaccagcttttacaatagcgaaaatggcaatcagcattgccatgccgcgcggcaggcggatagctaccacacgatcctcgccgatccccagcccacgcagataatgcgccagttggttagagcgtgcattaagatcgtatagctcagcgccgcgtcccccatcaatacagcggctttttccccatattctccggcgatacgatacaaatagtcgactatcgtttggtcgtcggtaggcaactgtctcataatcccttgctgttccataactctggccttcaaagcgagataagtaccgtaaaatggcgtgacgggttacgcctgtccgccgttgtcggaagccaaccgcgcgtggcaggcgtcgatttctgcctgactactgcctttgagttgaaatccctgttcaagaagctcatgcaaaaaagcaatgtcctcttcgctggatgtgccgcgctgctcaatctgctggatgcgctcaaaaaaacgactgagcaattctttcaattgcgcacctggcagccacatcggcggcgcggtgatggcgtgtggctgtcagggcgttagtgagcagcgtgatgcgttggcggcgcacggcttccggatcggtcttcaccgccatgttatcccccagcaccaatgctagttgcgcacgatcatgacgattgtcaaatgcgtaaactggtgctggatagcgattctccagcagcaggtttttcagcacactttgcggaccgatctctatcgcgatcggtgacaagtgtcctgtcaggtaggtgagagagcgctgccactgcactggctgagagagctgttgttctagccactggactggcgtgaccgtatcgggatagggttgagcgttgacattggagatcactgggcagcacggacgtcgccattcgcagcgatccagcgccttgcgcaattgctgtccgcaaggtttcaatagtgggctgtggtaaggaacaccaccaatcagcggcactacttcgacttggcgatcatgatccagcaggtattgctcggcggcgataatggccgagttttgtccggataacataaactgttgcggcgaattgaagcaggcaataccgacctgctgtcgggtttcacgctccgccacctcgcacgccgctgccaccagtgcctgattcccttgcttgatgatagtggtactcgcgtccatttcgcgggcgatctcactggctaaacggctacgcatcgccaccagcgccagtgcttgggaaaagctcagcgcaccactacaggtcagcgcagcatattcgcccaaactatgacccaacatataacgtaggttgacatggacaccggtttgcgccaaaaactgctgccacgcgacaaagtgggccacgctggtggtatagatagccagcgccattgccgtcggctcagcaagttgtaccaaagtacccgacaggcacagcgctgccatgtcccgttccgtgatctggctagcttcatcaaacagagtacgcacctgcggataacgctcatacagccaccgtgccatgcctacatattgcgaaccggagccagggaacatcagtgcgacatccttcgtcatgcttcactccccatcatgtaattcatcgcaatttggatttcatgaatttgcgatgtcccttcgatgatttccatgattttggcgtcgcggtagtaacgttcgacggcataatcggcatggcaaccattcgcaccgagcagttgcaccgccttcccggccacgtccaccgcagctttggaagcgacatacttcgccatcaggatttggtttatcatggccgggtgcagcgtttcgcggtattccgccgcgctgaagcacattagttgcgcactggcgtttgggtcagcattgtggcaaacaagtgctgaacaatgccatgagaaaataaccgccgcttgaactgtttacgctggcggatgtagcggttgccacatccacagcggcctgacataatcctaggctgccacaagcggtggtgaaccgcccttcattgagcgcaaaattcaccgccagcggtaccccaggggtgagcggaccgagcaatgcatcctccttcaggcggcagtcattaaaatgcagctctgccaacatattgccgcgtaaccccaacatgtcgttgagtggagtgatagtaaagccgtcggtattgcgatcgataagcactgtcgctaattgattaccacagtggattaaacaataaaaaaatcagcaatctgccctagcgtgatccatttctttttcccgttcagccgccaaccgtcgccatcctgctgtaattctgtttccacgttcactaagtcactgccgatattcggctctgtgagggcaatcgcgccgatcaattcccccgttgccagctttggcaaataatgggctttttgcgctgcgctgcccacgcgttgcagcagcgtgctgaccatgccagtcactgttatgagattttctaacgaaccgtgaaccccagccatcacttcatgcaaagcgcacagttgataagaatcgtaacctcgtccgccatatttttgggggattgacgcacctaagtacccggcctgcgccacgcaagaaataatgtctggcacaataaactgctgacgttcaatattctgtgcagccagggcgagatgttgtttggcaaacaggactgcctcttgctgagccagctcataattttcagtgcacatagtttactccaggcctgtttgtcgctgaatgagctccactattttattgacggtagcaatctgttctgttttcaactcactcacttccagctcaacctgaaaatttttttctataaacagtatgatttgcacagtaaataacgaatggacaagcccgagagaaaaaatatcgtcatcatcgttcaacgtatgcccacgtaatgagcgtgaaagaaattcccgaatggcggctttcatatcttgctttttcatattcatatccctatctggttaacccagaatcactgctcggcgtacgtctgttgatagcgataaaacccctgccctgatttcacgcccaaataccctgcatcgaccattttctttaataaaaagctggggcgatacttatcatcattaaaactttcatatagcacctgcaacgattgcaaaatcgtatccaagccaatcaaatcggcagtttgtagtggccccatcttgtgcccgaagcaggttaaacaacgtatcgatatcctcagcacgggcgatctgctcctgcaccataaatatggcttcgttaacaaaaatcatcatggcaccgattagtgacaaagcccggagaatcattgaccacgatgccggttttattcaactgagcaaataagtggtgaaatatgttcagtgtacgctctgcagtatgtacaccacggattaattcgacggtgtgcatcagcggtaccgggttcataaaatggacgccgactacattctccggatgtcgcattaattttgacaacgcagtgatagatatggcggacgtattaacaccaaacactgtcgacgcgccgcagatcgtattcatccgtgtgtatagtgcattttttttctctatatcctcagtaatattctcaatcaccaaatcacattctacaatgtcgtccaactcagttgtgaaacggatattttccattatctccgctgtgctatgcgtcttttttttatgctgcgggtgaaaattatataagcgtaagttcgcttcgatcatctgtcggcatttatccaactgagattgagaaatatccacaacgttagttgatatgccgtattgcgccatgttatgagcgacgccagttcccattactcctgcacctattaccgccacgttcatcattgagctcctttactgacaggctatttcgaggttgtcttcgccccccagttgcgccgcgatatgcgcgtagatattgcgcggattggggttttccatcagggtcaaaagatcgatatgtacgttgaaatcgcgttctaaacgggaggtcaattgcgtcaccagcagcgaatgcccgcctaattcaaaaaagtcgtcgtccaccccgaccggcgatatttccagcaacagttccatcagacctgtgatatactgcataccccgcgagtgtgcggctacgaaaggtacgcttaacacgggacgtgcctgataagggtggtgcgtttcgggtcctgcttcgggttgggtctccacactacccattacccgtccaggcaatgggtagtggttgtgtgcgaagggatatgctgatgcgctcccgcgttgcggcagcggagtgccgtaccacacggcccaatccacattgatacctgcacaccacagttgcgccacgtagcgcaatacatcaacgtcttctcttatttccggcggcagcctaacccagttgatactgtgaacgccctcccccagttctcgggtatctgccaacagcgcttcactccaaaaccctctgtcgttacgctgtgcatcggtgatgggatttccttgccaagccagcacgtagccggggataggttcatggcgctcaggaagccagagatgaagcgccttttgctccatttcccacagcaaatgcaacacgtcttgcgtcgcaatcatgccactggctgcagcggcaggcaaaaggcctgttccagcacccgacagcagtgttaatgtcggtagcaggttcatccaggtttttagcgcggcgatagtctggcagcctctgattagcaggctgctgttcgcttgtgccgcccacgtttcagcgtggcaataagcgggtggaatattcatgccgtcgagtaatgccgtcagagcagtcgcttcgcgttgataatgtgccgaatgcgccagccactgtgcgtaagtacaatcgttcgtagtacgtagatctggacagtgtaggccccaaggagcgtcgggcattaggttatccagcgatgccagcatcgcttgcgtaccatcgttttccacttgtatcactcggcggcaatcaaacacggggcgcgccacttgttgtgtgtaggctagcgttgacgcatcaagggtagccagcaacggggtaagctgttgcgtcagctcatccaactgctcgaaagacggcgcggagagagggataaacaccggtgctcgcacttggtcatggtcatcgcgcaccgcaggattcagcccttccaaaatcatatgcacattagtaccgccaatgccaaaagaactgacgccagcgcggggcggcatccgcgatgcgggccactcctgcggctgtatcgggatataaaacggtgaatgcgccagatccagcttcgagttaggcatttgatagttggcgagcggcggaatggtccggtgatgaagtaccagcgccgtcttgattaacccagccacgcccgccgccgcgtgggtgtggccaatattcgcctttacagcccctagtgcacagtattggcggtgtgaagtatcgaacgcctccgtcaacgcagcgaactcgataggatcgccaatacgggtgccggtaccgtgggtttcaacgtagccgatgctttctgggcttacttctgccagatgacaggccgcacaaatgaccgccttctgtccctcatgaccaggcgcgacaaaaccgattttttgtttaccgtcattgttgaccgcgctaccccggatcaccgcatagatgcgatcgcccgctgccagagcatcttccaaacgccgaagcacaaccacacccgcgccatcgccaaacagggtgccagaagcctgactgtcaaaaggacggcagtggccatcggtggagtggatcatgccctgttgacagaagtagcctgacttctgcggtaaatcgatagtaattccacccgccaacgccagatcacattcgccaaacaacaagctgcggcaagcgatatgcgttgcactcagagaagtcgaacaactggtgtagagactatacaccggaccgttgagattgagactgtaggcaatgagatgtgcgagcagatccttatgaccatagatgccagactcaaaacgattcagcgcatcgccgccaatctgtgacagcgaacgccgtagccaatccacatcttctgacgcccccacgaataccccggtgatcagatcgctggtacgttgggcatagcctgcatcttccagcgcatggtaggcaacttcatgtaatacgcgggatttcggatccagagtctgcgcctctttgtgactgtaaccgaaaaatgcagcatcaaagtcgcatatgccctcgatatagggcttggcccgtacataggccgggttgtccagagtactctgttcgacgccttcggccagcaactcctcctcgctaaagaaggtgacgcactctttaccctgaacgatgttatgccagaattcgtgtaacgtccgggactgcgggaaacggaccgccataccaataatggcgatttccatgccgttcatttcgcttgcgtattccataaacttcattacctttcttcagggcgaggaggcgcccggattaatgcaaagacgtgtgactgcgcgcagtatttttcgcaatttgcaaagcacgttttgctatctgattcgcgcgcgtattcgtctgtactgcaggctgtggtgatggcgcatttgactcgccctccgggggctggcaaaacgtcgccagctggcgcacggtggcgtggttgtacagcgacaccacgctcacttgcggatagtgacgcgccatttgcccactcagttgcaccatatcgagtgaggttgcccctaattcggcatagttgtcgtcaatgcctactctatccagacccagatactcttccaggatttggcagagcacgcgttccacttcacgtgtcgcggggctgtaaggcacgccaatttccggacggggccgctttttcactgtctgctgagtaatcgtatcgttagcggcagacggtacaccgcgatccacccggttgccccgcgctaatctatcgatcgcccgaggtgagagcagcagttgcgcccacggactgcgagtgttcagtatcggccacaattggcgcatcacctcggcattgctcatgctgagcgcatagccgccgaggcgcctttctgctatcatggcgttcagccggtccatgcctgccgcagtgcgatgcgttaccaccaccttgccaatatgctgcggcgtggtcagggtggcgaaggcgcgtgcaacctcgggcaatggtacggatttgcatggaaggagcggtagcgtgttatcatctatccaagcgacaatctgttgcaggtagcgactaaacgcaccatgtgccgcgtgaaaattaatcggaataaaggtgccgccttgggcgaagaaacgcatcggtagcgctttgtcttccacaatgtccttgctgcccagctcaagaaaacggcccagcggtgccagcagcgcgaggctagcgtcaagcagacggcctgtgagggagttaaggatcacatccatcccctgtccgtccgatgcggtcagcagagtggcagcgaactgttcgtcgtgtgaatcagctacggcatgtacgcctagcgaaagcaagtaatcgcgtttctgctcgctacctgctgtggcgaaaatctgtgctccgcagcgtttggcaatatgtagcgcagccaagccaacgccccccgccgcactgtggatcaatactcgttctccgggttgcaaattagcgcgcaccaccagtgcgtaataggcggtgaggtatgcgataggcagcgcaccccctgttcgatgcgacaatgggctggttttctactacgcaatcgctttctacccgtgcgtactggacaaaaccaccgtttagcaccgccataacatcctctcccggggcaaattcagtgacatttttacccacgcgagtaatgcgtccggcgcactccagtcccaattgcagcggacctcacccggctgctgccggagcaatcccgtggtgaacagcacatccttaaagttcagtccggtggccagtacctcaatctctacttgtgaatcccccagcgctaagcgcggcgtagggcacaacgctagctttcctgccccctccccctcagcggccagccgcagttggtagttatcggcactgggcacgcgcagtcgcgtgtcgtcatcgacatcttgtatgtggagctgtaccttgcgcttcaccattgccgcacagcgggcaaccatctcgcctgccatgtcgtagagcgtgaaagcgtagctgtcaccctcctcatcgtgccgattgacagtcagcgccacatgtaaggtgttcggcaacgggcggtacaggcgtaaatcctgataaaggaaaggtaccgaatcagtatgaaaaccaggcagttgttcgacaacactgctggcgatgtccaacagcgcagggtgcagtgcgatcgtatcattagcggcaacggtgggcagggccagcgttgcgaaaacctgagtctgggcggtattgccatacagttgttgtacgctgtgccagcgcggcccatagtggaagtgcgtgctcgataattcctttgttggaggagtgatagtgtgcatctcgcgcatcagccccgtgagatcgcacacaacattatcgtctaccatcagacgcgtcgccctgcctctggcatgggttgttaacgtgccactaaagcgctccgtcattgatttcacctcgacactaactccttgcccgttaggtgaaatgtcaacaaaaacgtcaacactgcagttgtccatcacagtcaacggtgccaaaaagaccaattcatcaatgcagatttggtcttgcacaaagtaatggcgcagagcttcatacgccagcgccagatagccggttcccggcagcgtggcgataccggatatccggtgctcatccagcagccaatcggactcgggggataatcgcgcgtagtagctggtgtcagccccttgttgtttataagcctgtagcaacgttcccgtcatcaatgggcgcagtccacgcaagacatcgtattcactgccgtttatagcatccaacaacatgccctgctcacgcaatgcatccaacccgatactgagcgcattcaccttgtagcgggtacgcagttgctgtgccagtgcatccaaataggcgctggcggtagcatagcctgtctggccgatctccgcattcacggcagccaacgagttacagaacagcagtagcagacgctcatccagcagattccgttgcgctaacgcatgcagcacattagcagtaccccgttctttcaccgttagcgtgtcgcgtagcgcagattcgctcaattgatgcagtgtcaatgtggtggtagcgtcggcagcaaaaatcacgccatccaaccgtccatagcgttcgagcagagttgccagacaagctctaaccgcctccgcctgcgtcacgtcgcagtggataacgtctaatgcgtcctgctgcaccgcttcatggtgataacctgtgcggctgctcagtaccacacggactccctcacgctgagcaagcgcttcgccgatcatgcggccaatccccttttcaccgccgataatccacagtacgttgcccggtatacaccctgtttgagggggtaagtgcgccaacagccgtgtcgggataaagcgtcgcaggtaaagcatcccctgcctgagcgccattaccgtttcttgtttcggggccagacgctgggttagcaagttcagattctcatcactgctctgcgcatcgatatcgatcaatcgtacttcggtcgggtgcagctcttgggcaaacacgtttactgcgcccgacaacgctgccagcgtcggttcgggattatcctcttcctgtacgcgaaacgcaccatgggtcaatactgttaaggacgccagcggcgtggtgctgtgcatacaccagcgagcaacacgataaagtcccgagagcgactgtgtcaacgatgatcctgcctccgcaccgggagcatacaagcaatgtaactgtcggtaggttttgtgtgctaaaagtgcgcagatgtcgtggaaatgcgtcagaatacggtcattatcccacacgtcgtcctctgacgatatcggcagcggcattgtgatgctgtcgacaccactactcatcagcgtctgctgtaacttgtcgccgtcagcactaataatgatgatcaattcgcccggcgcatagaacgcctcccgcaaggatgtgtcgtgcatccgccacagcacacgctggagccactcatcttgcggacggcgcagaggatttggatactggcgataaccggaaatgtgcacgcaccatagcgatagtaataagtctgttcgaaggggtaatccggcaatggaatgtgcttgccgaagtgccgtctggttaaagcgtctccaatcaatattctcccccctgacccacagcgccgccagcgtacgatgcaacatgtgctcatcatcgatcgccgcgttggctttgcgtagcgtcaacagggtgggctgatcgctgtattggttatgtccttgaataaaggtagagagcgtattacccgggcccacattcgataaacagcgtgggttgtaccaacagttgcgccgcaccttcgctaaacagcaccgcgttgcgcacttgctgcacccagtaatccggcgaggtagcttgctcctcagtaatccatgtaccgcttacattagatataaagcgcttgtgcggcgcgtgcatcgggatttgccccagcaactgtgcaaaatcgtgcagcatcggcgtcatcatggccgagtggaatgcgtgagaggttttcaggcgcctgtgctgtatcccgccctcgactaagcgtgtgctcaaacgggaaatggccgcctgctcgcccgcgactacgcaaaaatgcgcgctattattagctgccagttcaataccccgttctgcagctagccatggggtcaactgttcgcgactaaggtagaccgccatcatgctaccgggacgcatggactgcatcaaacgtccgcgcgcctcaatgacgtgcagcgcatcctcaagagtaaatacgccagcaatacaggccgcaacatactcgcccagactgtgcccgatcatactgtccggcgtaatccccagatcaatcaaggtgcgcgctaggctgtattcgacacagaacaacgccggttgtgtgaactgcgtttgatcaatatcccgcgtatcctcatcgtcaaacaacaacgccttgagatcgaccgtcgaatagcgttggaatgcagcaaagcagcgatccatgtgctggcgaaacatgggttgatgagcatagagcgcgctggccatgccgtgatattggctaccttgaccaggaaacatgaagcagatctccgctgtcgtgcgctgaccattgaagatttccgcttgcaatatcgtggcacaggagagatcgattttcgacccacgactcaccaaataagcccgccgatggtcaaaggctgtgcgtccagtttgcaatgtataagccacatccggcaggcgcacccctactccatgcttgacatattccagtgtggaggccacgcgcaactctaacgcagcgggtgttttagcggagaacaacaacagatagctgtcgcgtacccccgtcgctgaagggtcgtcctcatgttgatgtgcttctagtgcgatgctggcattggtgccgccgatgccgaaggagctcaccagtgcacgacgaggacgcgtcgacggccacggttggacttgctggttaacgtacaatgcagaacgcgatagatctatagcaggattgagttggcgaaagtgcgctgttggtggcaacacttgatgatgcagggcgagcgttgttttgatgacgcccgccactcccgcagcggagttgaggtggccaatattacttttcagcgctgaaaccacacaaaacggaacaggtgttgggccaaacacctcattaagcgcacgtaactcaataggatcacccagcaccgtaccggtgccgtgcgcttccaccaatccgatactgtcgctatcaaaaccggcacggcgcaaactggtgcggattaccgttgattgcccgatcacactcggcgcggtatagccgattttgttattgccatcattattgaccgccgaacctttgatcacaccatagatgcagtcccgatccgccagcgcgtcgtccagacgttttagcagcagcattcctaagccatcaccggtgactgtgccagaggcttggctatcgaaaggacgacagacaccatctcgcgcattgatcatgccttcatgatattcatagccccggtacgcaggcatctcgatagaaacgccgcccgccaatgccgcatcgcaatcccggttacgtagtgcgatgcaggcctggtggatagccactgccgaagtggagcaggcggtgtcaagcgtcacggcagggccggtgaggttaagcgcatgggcaatcaatgctgtgacggaatggatattcaggatactggccttgtacagggcggtagagtcggtagtgtcttgcattaccgcattaagccagtggggggatgtcagcagtccggcataaatgccaatcgcaccagtaaaggtggcaggatcgcacccagcgtgttccagagtttgccagcagcactgatgcaataagcgaatttgcggatccatacattccgcctcgttgggagtataaccaaagaaatccgcatcaaaccattcgtgatcatcaacaatccctttggtttttatataattcgcttgtttaagcgtgtcaggtgtcacaccatgcgcgcgcaactcttcatcactgaacagtgttaatcccgattcccctcctacaaccagcgtccacaacgctgcaatattcgccgcaccggggaaacgtcccgccataccgacaatcgccaccggcatgtcgctgtagacaacagcacgcgttggaattgcatcctccggcgatacggcagtatcgagaaaatgtgctaacgccgtgagcgttgggtacttaaagagatcggtaatatcaatctccaagccaagttgccgcttaatatcccctttaaccctgatggtatccaatgaggtgccaccgagggcgaaaaaggaggcattgctatcaatgtcttgtctatcaagtacgcgttgccagatagcatgcagcgcatgttccatgtcactatgcacctctgatatcgtggtggacacggcgttgcactgagttgcgggcaggagataccgcaactgcgccaagtcggccttgccactatggctttttgcaatctccgtcaccaccaccaaggattccggaatagcgaatggcggcaatctgtcagccaattgccctcgaacttccacctcatcatagctatcattgacgcagaccactgccgcaatatgcagcgtttcacgtacgcggtaaggaaccactaccgcctcgataatgccggagcactccagcaggcgctgctcgatctctccggtttcaattcgttgtccattgatcttaatttgaccgtctttacgcccaaaacagtcaacacagccatcatccagcaaccgggcataatcgccagttttgtacatcataccgccgggaataaaaggatcagggacaaaaaccgtcgcacttagcgccgggttgttctgatagccgatggcgacccccactccacccgccactagttcaccggtggcaccgataggcaacaaatgcccatggagatcggtaatgtagagcgaggtgcccggtaccgcgtatcctatcgggactcgggcgggttgcaacccgttgaaacgatatgcggtggtaaaaatagtgttttccgtcggcccataaccgtttgtcaccaccagatgcgggtatttttgcatcacgtcgttgacatgccacgcagatactgcttcgccgcccaccgtaatgtgttgtaacataccgaagaaatcggcaccttctgccacataggagttaaacaaggatgaggtaaaccaggcgcgcgccacctgttcatcagcgatcgtgcggcgaatgtgattgatatcaagtaatgcctgtttgctgagtaatactagtttgccgtggttgagcaaggtagaccacatctcaaacaccgaaacatcaaactcaaatgggcaggtcagcagcgttgtctcaccgctctccaccttcagcgggctgtcgccttgtatcaggcgcaataaaccgcggtgcgccaccgcgataccttttggcttacccgtcgaccccgatgaataaatcacataagcgcgagaatctggtgtgataaccggaaataccaccgagggcgcgacgggaaatgcacagaggtcactctgcgcaacgtttaatgcatctagcggtttgccatgtaccagcaacagcgccaagccgctgtcatcaataatttcctgcatcctacccactgggtagtcggggctgatgggcacataagcagccccgatcaacatgatggcgatgatggcaaccacggtgtttacccggcgttcgctaattatgcctacagtatcgccaaccataacaccctgctgtaccaaataagccgcgagctgctcagcttgtgctgccaactccgaataggtcaacgcgcacaattcatcaaccactgcgacctgtgctggcgaagtcgcagcaacttgatgaaattgttcgatgacgttggattgactatcccaatcccggcatgccatgcgttccagatagggttgaagtacctgcgcctgctggcatggggacaagtttaccaacgcagcaatggggcgctgcggattgtccaccagttgttcaagcagataactcaggtgcatcagcaacgcttgcgccatgttgttggtcaggtagttaagggcatatgcaatactgaaacggaatcccttctgttgagtgatggtcaaggtcagcggatagtgcgtttgttcatgtacactgagatggcgaattgccacgggcgacgcgcatgacaataatgtcatatcaacgggataattctccaacaccactaaggtattaaaaagatccccagcatgaccttctttatgtaccaaccgttgtatgctggctaaggcatcatgttcattgctgtagtgagctattagtgtttggtgcatacgttgtaagtgttgcaacagtgtcgccccatcatcacgcagacgcagcggcaacgtgttaataaatagccctagtgtttcttctataccatcaattggtatatttcgccctgatattgtcgcgccgaataacacatcgtcagcatagcaccaacgttgtagcaggatgccccaggccacatagaagattactgcgggggtgatacgataatcgctgcatagcgtctgtattttctgacacacatccggagacaaattgatctccacatgatttgtttgattaacgtaagaattgttctcggcttcagtatctgtgtgatattgtgacagcggcacgatacaagttggtgttccctcccgaagatatgcagcccaatagtcgtgctgaaaggtgtgacgtcgggccgacagtgtgtctacaaggggtttcagagatgaggggataatggcgctatcatccctcacaccactgaccacagccgctccatagagttggagcaactgtttaatgaaaagggataagctccagccatccatcacaatatgatggtatgatagtataaaagcactttctttcgttgactgaataaggtaggcccggactgggatcgttttcaaggaaaatgggtattttaaatcagcctgtagcagttgaggaattatagcatcaataccgtcatcctgcgggacaggaatgataatgtcatcattagctagtagaaaacgtatttcctcttgctcacagtctaacacatatatatccggcaacacatcggtcttcaccacctgacaagggcgctcatcaatctcccagttataatcagtgcgaaaacactcatgctttcgaaataacgtttccagcgcccacttgaagtgggcgctatctacatgctgagaaaaaatgcatgtaaaatgctcatggtagttactccttttcttatcctttaaggaatggaataaaaacccctgttgacttggtgttagcggtaactgcttacgcgtgtccatcttattacatggaaaatctccagaggtattatccataaccatcaccttattatcggatttatagattatttaacatgattattctaaatggcacacctatccgcaagtatagttttttattgcgtattcatataatcatattgcattttatcacttacaggaatacccccaaaaaatccttatattctgattacatgtttttcttcaatgaattagattctgtctgtaagcaaaaacatgtaagtcatgcagtacatacatgatgtagcgggtatgaattgatacagccaccacatagaaaataatgcgtaattcccatttacataaaaaccgttgtatcgtaaattcctcttaaatactgccaaaacaacagatacacagatacacagatacacagatacacagatacacagatacacagataccattcaggatggggggaaacatggataagttcaaagaaaaaaacccgttatctctgcgtgaaagacaagtattgcgcatgctggcacaaggtgatgagtactctcaaatatcacataatcttaacatatcaataaacacagtaaagtttcatgtgaaaaacatcaaacataaaatacaagctcggaatacgaatcacgctatacacattgctaacaggaatgagattatctaaatgaggattgatatattaattggacatactagtttttttcatcaaaccagtagagataacttccttcactatctcaatgaggaagaaataaaacgctatgatcagtttcattttgtgagtgataaagaactctatattttaagccgtatcctgctcaaaacagcactaaaaagatatcaacctgatgtctcattacaatcatggcaatttagtacgtgcaaatatggcaaaccatttatagtttttcctcagttggcaaaaaagattttttttaacctttcccatactatagatacagtagccgttgctattagttctcactgcgagcttggtgtcgatattgaacaaataagagatttagacaactcttatctgaatatcagtcagcatttttttactccacaggaagctactaacatagtttcacttcctcgttatgaaggtcaattacttttttggaaaatgtggacgctcaaagaagcttacatcaaatatcgaggtaaaggcctatctttaggactggattgtattgaatttcatttaacaaataaaaaactaacttcaaaatatagaggttcacctgtttatttctctcaatggaaaatatgtaactcatttctcgcattagcctctccactcatcacccctaaaataactattgagctatttcctatgcagtcccaactttatcaccacgactatcagctaattcattcgtcaaatgggcagaattgaatcgccacggataatctagacacttctgagccgtcgataatattgattttcatattccgtcggtggtgtaagtatcccgcataatcgtgccattcacatttagagatcatccggcataatcaatctgccaacgaaggagagcgctatgcgtaaagcccgttttactgagcatcagatcatcgccgtgattaagtcggttgaagccggacgaactgttaaagatgtctgtcgcgaggccggaatctctgaagccacctattacaactggaagtccaaatacggcggcatggaggcttctgatattaagaaaatcaaggatcttgaggacgagaaccgccgtctaaaacaaatgtttgccgacctgagtctggagaaccgggcgctgaaagacgttatcgaaaaaaagctttaaaaccagcctttaagcgtgagctggttactcatctgataacgacgttcgaactcagtatccgtcaggcctgccggagtctgaacctgagctggtctgtcgattttatgcatgatgccctggtctgtggccgtcgttttcgcatgttcaatgtcgttgatgattttaaccgtgaggcattgtcgattgaaatcgatctgaatctgccagctcagcgagtggtccgtgtactcgacaggatcgcggcaaaccgtggctatccggccatgcttcgtctggataacggcccggaatttatctccctggcactggctgaatgggcagagaaacatgcaataaaactggagtttatccagccgggtaagccgacgcagaacgctttcattgagcgctttaaccggacataccgaacagaaatactcgatttttatctgttcagaacgctgaatgaagtacgggaaatcactgaaaaatggttatcaaaatataactgtgaacgcccgcatgaatcgctgaataatatgacaccggaggaataccgacagcgccattatttggccgggatctcaaaaagtgtatggaactaaaatgggtctatttacactgctgctacgataatgcctgcgtggaaagcttctttcattcactgaaagtggaatgtctccatggagaacactttatcagccgggaaataatgcgggcaacggtgtttaattatatcgaatgtgattacagtcgctggcgacggcacagttggtgtggcggtctcactccggaacaatttgaaaaccagaacctcgcttagagcagtgtccatattacgagggtaggatcagtcgtttctttcgcggtaactttatatgatcgctgtgtaccagcatcgagagaagaaattcaggatgtattcaacactgagttcacaagctctgtagctattaagtcagtattatttacgtttacgatacatgttattatcgcaggatctttatcttggtagtgatactgcgagtggatacacccccactcagtatcttctataactatggcttttggttcttcaggcatcataccttccataacacgttcttgatggatacgtaacttgtagtacttctctggagatgaagaaatttcaacgagtacagattgtagatgtacgaagcctagaaatttaaaacactcggattttgtagaggattttaatgataaagtccagataacaaacacgttattggaaccatcaccataatttttagtgtcaatcttatctaccagctcctcgttgattaacatagactgatttagcaacttccgcttcacgccctgagcggactgttatcgctctttagacacagttccactaggggagaggatcagcgcttcccacgtagggacactatagtaactatcaccacatgcagtagggaagctcaaaccaaatttatgtagccagctcctattggtggtcattctggtggtcttgacaggaagataactctggtttagcttacttattagccacttactggcaaaggcgatc

SEQ ID NO: 922 - DNA, 1269 bp, Escherichia coli
atgtcccttaacgacgcaaaaatccgtagtctcaagcccactgataaaccctttaaagtctccgattcccacggtctgtatctgctggtcaaaccaggcggttcccgtctctggtatcttaaataccgtattaatggcaaagaatcccgtattgcactgggtgcctaccctgccgtctccctgtctgacgcccgccagcagcgcgaaggcatccgtaagatgctggcgctgaacatcaacccggcgcagcaacgtgccgctgaacgcggctcgcgcatgcaggagaaaatgtttaaatccgtggcactggagtggcacagtagcaagaaaaaatggtcgcagaataccgcagatcgcgtgcttgcccgtctgaacagacatgtctttccgaccatcgggcatctaccagttaccgagcttaaatcacgtcatttcattgaattactgaaaggcattgaggaaaagggcttgcttgaagttgcgtcccgctcgcggcaacacctcagcaacattatgcgttatgctgttcatcaggggttaatcgaaatcaacccagctgcaaatcttgacggcgtgacggcttctcccgccagacgacattatcccaccctgccactggagcgccttcctgagctgcttgaacggattgacagttatcaccaaggacgggaactcaccaggcttgcagtcctgctgacgttgcatgtgttcattcgctcaagtgaactgcgctatgctcgttggacagagattaacttcagaaatcggatctggacgatacctgccacacgcgaagcgattgcaggcgtacgttattccagtcgaggtgccaaaatgcgtacaccgcatattgtgcccctttctgagcaggttatctctattctgaaaaggattaaggaaatatctggcgggtatgaactggtgttccccggctatcatgacccctacaagccgatgagtgaaaatactatcaataaggcacttcgccagatgggatacaacacgaaacaagatatctgcggtcatggtttccgggcaatggcgtgtagcgcgctgatggaatccggtttatggtcgcaagatgcagtggagcgtcagatgagtcaccaagagcgcaacactgtgcgtctggcttacattcataaggccgaacatatggaagcccgcatggacatgatgcagtggtggtcggattatctggatatgtgcagtgaaatctgggtgcccccgtacatctggagtcagcaaaacattaatctcgcagtaacc

SEQ ID NO: 923 - protein, 423 aa, Escherichia coli
MSLNDAKIRSLKPTDKPFKVSDSHGLYLLVKPGGSRLWYLKYRINGKESRIALGAYPAVSLSDARQQREGIRKMLALNINPAQQRAAERGSRMQEKMFKSVALEWHSSKKKWSQNTADRVLARLNRHVFPTIGHLPVTELKSRHFIELLKGIEEKGLLEVASRSRQHLSNIMRYAVHQGLIEINPAANLDGVTASPARRHYPTLPLERLPELLERIDSYHQGRELTRLAVLLTLHVFIRSSELRYARWTEINFRNRIWTIPATREAIAGVRYSSRGAKMRTPHIVPLSEQVISILKRIKEISGGYELVFPGYHDPYKPMSENTINKALRQMGYNTKQDICGHGFRAMACSALMESGLWSQDAVERQMSHQERNTVRLAYIHKAEHMEARMDMMQWWSDYLDMCSEIWVPPYIWSQQNINLAVT

SEQ ID NO: 924 - DNA, 291 bp, Escherichia coli
atgtcttgcagaatagcggggtgcttaccgtttgcctccccactgatgatttttccgggcagcgatgagtgtggactggcggcactatcacccgctgctccggaacatattctggttaatgatacggataaaatgtgtaagacaataagtctacttaacataagcacatgcgaacgcatgtgtattaagaaccatgatgtcctggacgacttagaagatgaaaaacggcctgtggatgaaaagccgtatcagcgtttgctgatacggcctggttctttacaagattattca

SEQ ID NO: 925 - protein, 97 aa, Escherichia coli
MSCRIAGCLPFASPLMIFPGSDECGLAALSPAAPEHILVNDTDKMCKTISLLNISTCERMCIKNHDVLDDLEDEKRPVDEKPYQRLLIRPGSLQDYS

SEQ ID NO: 926 - DNA, 510 bp, Escherichia coli
atggctgttccatcatcaaaagaagagttaattaaagctattaatagtaatttttctttattaaataagaagctagaatctattacgccccaactcgcctttgaacctctattggaagggcacgcgaaggggactacgattagcgtagcgaatctggtttcctatctgattggctggggagagctggtgttacactggcatgaccaagaggcaaaaggaaaaactattatttttcctgaggaaggatttaaatggaatgaattggggcgtttagcacagaaattctaccgtgactatgaggatattacagagtacgaagttttattggcacggttaaaggaaaataagcagcaactcgtggctttgattgaacgattcagtaacgatgagctttacggtaaaccttggtataataaatggacccgaggtcgtatgattcaatttaataccgcctcgccttataaaaatgcttcggggaggttaaataaactgcagaaatgtcttgcagaa

SEQ ID NO: 927 - protein, 170 aa, Escherichia coli
MAVPSSKEELIKAINSNFSLLNKKLESITPQLAFEPLLEGHAKGTTISVANLVSYLIGWGELVLHWHDQEAKGKTIIFPEEGFKWNELGRLAQKFYRDYEDITEYEVLLARLKENKQQLVALIERFSNDELYGKPWYNKWTRGRMIQFNTASPYKNASGRLNKLQKCLAE

SEQ ID NO: 928 - DNA, 720 bp, Escherichia coli
atgagtaatatcagtttgtattgtttgccatattcaggtggttctgccgccatgtattataaatggcgtagcgtgctgtcggacaatattactttgcggcctttagaacctgcggggaggggaactagaatacgccagccgctgtgtcttacgatggtggatgccgtcgctgacctttatcaacaatttgtgaaacactacacaggtggagactacgccatttttgggcatagtctcggagggatcatggccttcgaactggtgcattatattctcgatcatggacatgacatgccatgcgcgctgtttttttccggctgtcgcccacccgatcgggcctctcatgaagtaatactgcataccttgcccgatcaggcgtttatggaagagatcgtcaagctgggcggaactccggttgatgtctttcgtaataaagagttaatgacaattttcacccccatcattaaaaacgattatcggctctatgagcagtatgtatttcaggccaaggcgcgcacattaacctgtccgatcgtgctatttcatggcgatgctgacaatctggtaatgcaggatgaattacttgcatgggaaaaattcaccacacgaaagacgcggactattatatttcctgctgccgatcatttttttgtcgataagcattttgaacaggtggtaggttatgtgaaccagacgattgaatcactcgaaatagtaggg

SEQ ID NO: 929 - protein, 240 aa, Escherichia coli
MSNISLYCLPYSGGSAAMYYKWRSVLSDNITLRPLEPAGRGTRIRQPLCLTMVDAVADLYQQFVKHYTGGDYAIFGHSLGGIMAFELVHYILDHGHDMPCALFFSGCRPPDRASHEVILHTLPDQAFMEEIVKLGGTPVDVFRNKELMTIFTPIIKNDYRLYEQYVFQAKARTLTCPIVLFHGDADNLVMQDELLAWEKFTTRKTRTIIFPAADHFFVDKHFEQVVGYVNQTIESLEIVG

SEQ ID NO: 930 - DNA, 1503 bp, Escherichia coli
atggaacacgttagcattaaaacattatatcatctcctgtgctgtatgctgctctttatttccgctatgtgcgctttggcgcaagaacatgagcctatcggggcgcaagatgagcgcctgtcgacattaattcaccaacggatgcaggaggccaaggtcccagccctttccgtaagtgtgaccattaagggggtacgtcagcgatttgtctacggtgttgccgatgtggctagtcagaaagcgaatactctagacacagtttacgagctgggatcgatgagtaaggcgtttaccggacttgtggtgcaaatactgattcaggaaggcagactccggcaaggggatgatatcattacctatctgccggaaatgcgcttgaattatcagggaaaacctgcttccctgaccgtggctgatttcctttatcatacatcaggattgcctttttcaacactggctcggctggaaaaccctatgcctgggagcgctgtggcacagcaactgcgcaacgagaatctgctgtttgcgccgggtgcgaagtttagctatgcctccgccaattatgatgtgttgggcgcggtgattgaaaatgtgacgggaaaaacctttacagaggtcattgcggaacgactcacgcagccgctgggcatgtcggcgactgtggcagttaagggggatgagattattgtcaacaaggcaagcggctataaactgggattcggcaaacccgttctgtttcatgcgcctctggcccggaaccatgttcctgccgcctatatccatagcactctgcctgatatggaaatatggatagacgcctggttgcacagaaaggctttgccggcaacgctgcgtgaggcgatgagtaacagttggcgtggtaatagtgatgttccgcttgccgcagacaatcgtatcctctatgccagcggttggtttatcgaccagaatcaaggcccttacatcagtcacggtgggcagaatccaaacttttcttcttgcattgcgttgcgaccggatcagcagattggcattgttgcgctggcaaatatgaattcgaatctgatactacagctttgcgcggatatcgataattatctgcgcattggcaaatatgctgacggcgctggtgatgcaattacagccaccgatacccttttcgtctacctcacgttgttgctgtgtttttggggggcggtggttgtagtgcgcggtgctttccgtgtttatcgcgcaacggcgcatggccctggaaaacagcagaggttacgtttacgcgtacgtgactatatcatcgccttggcggttcctgggctcgtggccgccatgctctatgtcgcaccgggtatactatctccaggacttgactggcgttttatcttggtatggggtccatcgagcgtgttggcgataccgttcggaattatcctgttagctttcgttctgacattaaatcatcaaattaaacgaattctattacacaacaaggagtgggacgatgag

SEQ ID NO: 931 - protein, 501 aa, Escherichia coli
MEHVSIKTLYHLLCCMLLFISAMCALAQEHEPIGAQDERLSTLIHQRMQEAKVPALSVSVTIKGVRQRFVYGVADVASQKANTLDTVYELGSMSKAFTGLVVQILIQEGRLRQGDDIITYLPEMRLNYQGKPASLTVADFLYHTSGLPFSTLARLENPMPGSAVAQQLRNENLLFAPGAKFSYASANYDVLGAVIENVTGKTFTEVIAERLTQPLGMSATVAVKGDEIIVNKASGYKLGFGKPVLFHAPLARNHVPAAYIHSTLPDMEIWIDAWLHRKALPATLREAMSNSWRGNSDVPLAADNRILYASGWFIDQNQGPYISHGGQNPNFSSCIALRPDQQIGIVALANMNSNLILQLCADIDNYLRIGKYADGAGDAITATDTLFVYLTLLLCFWGAVVVVRGAFRVYRATAHGPGKQQRLRLRVRDYIIALAVPGLVAAMLYVAPGILSPGLDWRFILVWGPSSVLAIPFGIILLAFVLTLNHQIKRILLHNKEWDDE

SEQ ID NO: 932 - DNA, 2457 bp, Escherichia coli
atggcaaaggatgattttacctgtggctcactggatattgccattattggcatgagcgggcgtttttccggtgcggaatcggtgcccgagtggtgggataagttgctggcgggtgaggagttcactcaaccgacatgcacagaagacgataatgggaacccttggattaggctgcgcaatataatcaccgctccctatgacttcgatgctgcatttttcaatattccgcctggcgaagccctgttgatggatccgcaacaacgaatatttcttgaatgctgctacaacgctcttgagcatgcgggctatattcccacgcaacttaagcgagtcggcgtctatggggcgacctacgccaataactattttatcgatcgcgtctatccatacctgaagatgagcggcgatcaccattatcttcaggcgcagattggtaacgaaaaggattacttgtgtgctcaggttgcctacaagttggggtttaccggacccgctgtgagtgtacagaccgcctgttccagttcgttggtggcagcatatttagcatgcgaggggttattgacttttcaagccgatgttgcgttggcaggtggggtcaccttgggttttttacaggcgcacggctacagtccgcaaggtgataagctggtatcgcaagacggacactgcgccccgtttagcgctgaggcgaccggcacggtatacagcagcggtgcgggagttgtggtgctaaaacgtcttgaggatgcactacgcgaccaagacagagtgtatgcggtgattaaaggaggtgcggtaaataacgacggcgggcgtcggctggggtttgtcgcccccagcgtagaaggacaggtagaagcgatcaatacggcgcttgccgccgcagaagtcgtaccgactgatatcgcactgatcgaaacgcacggtaccggtaccccgttgggtgatgagattgagcttgaagctctgcaccgggttttcgcaccggcatgtgcgccgcacagcattcaattgggtgcggtaaaagccaacttgggtcacctgggagtcgcttccggtatcgtcagcttaatgaaaaccgcactgacgctatatactggtttagttcccccgcagatcaacctagtaaataaacataaaaaactgttgcagccagcctcgccattttatctcagtgatgtagtgacttctgtcccacaaacgaaaaggatccatgccaccgttagttcgtttgggctgggagggaccaatgctcatttggttctgcaaaactggtgcgagacgcctgcgcaagcggtgcaagaaaatgagcgccgcctgtttttcttcagcgccaaaacgccattagcccttagacaacagttggatgctcattatcacgctctggcgacctatgcggaagcagataaagatcgtatcgcctatactctcgcgcaacgccgggcacatttcccgtatcgctgtgcgctggcggcagacagtgtggtagcgttgcgtgcaagtttggcgaaactgcgggatgctgacatgtcttttacccctatcaatatggaaactaccttggtgttcctatatccggaccgggacgataagctggagagtgccctgacgcatttgctggcttgtcaacctaacttgcgccagcggcaccagcgcctgtctcaggatgttgcacaaatctgcgaaccagccgattggacgccagcattgcgtcagtttatccagcaggtgagtcttagtgaatggctgatcgaacaaagtatctcgcctgtgcagcacatcggttacctgacgggggctgcagcagcgcagtatgttgcgcgcatcatctcactggaaaacgctgttcagcaggtgattgtggctgaaacgacaccggagcagacgctggccggcaacagtgaactgagcgaaatattggctaatctggcggtgacggagggaacgctgatgctggaaatcggtcgcgcggggacgttttccatattgtatcaccagcatgcgcagtgggttgggcaaacagtattttcccccatgctgaatacggatacgcctgaggacatcctgccgctgttgggcactctttggcaacgaggagtgactatttgtttaccggaaatgccagccgtgcagactataggcttacccggttattcgtttgatcgcgtccggtatgaaattcagtccagtgatgcgagagagaacgctatgttaccagtgagttatttgtcggtcagcgactttgtggagaaaacctggcgttcattgttatgcatcgatcattatgacgaacacgcggttattttcgaatacggagcgacctcgatgcacgttatctctttcgtcgacagctgtaaccacatttataaaatcggactgactgccgccgatatttatgccagacccgctatccgtgagcacagtgaatttatctccgaatgtgttgatggtatttta

SEQ ID NO: 933 - protein, 819 aa, Escherichia coli
MAKDDFTCGSLDIAIIGMSGRFSGAESVPEWWDKLLAGEEFTQPTCTEDDNGNPWIRLRNIITAPYDFDAAFFNIPPGEALLMDPQQRIFLECCYNALEHAGYIPTQLKRVGVYGATYANNYFIDRVYPYLKMSGDHHYLQAQIGNEKDYLCAQVAYKLGFTGPAVSVQTACSSSLVAAYLACEGLLTFQADVALAGGVTLGFLQAHGYSPQGDKLVSQDGHCAPFSAEATGTVYSSGAGVVVLKRLEDALRDQDRVYAVIKGGAVNNDGGRRLGFVAPSVEGQVEAINTALAAAEVVPTDIALIETHGTGTPLGDEIELEALHRVFAPACAPHSIQLGAVKANLGHLGVASGIVSLMKTALTLYTGLVPPQINLVNKHKKLLQPASPFYLSDVVTSVPQTKRIHATVSSFGLGGTNAHLVLQNWCETPAQAVQENERRLFFFSAKTPLALRQQLDAHYHALATYAEADKDRIAYTLAQRRAHFPYRCALAADSVVALRASLAKLRDADMSFTPINMETTLVFLYPDRDDKLESALTHLLACQPNLRQRHQRLSQDVAQICEPADWTPALRQFIQQVSLSEWLIEQSISPVQHIGYLTGAAAAQYVARIISLENAVQQVIVAETTPEQTLAGNSELSEILANLAVTEGTLMLEIGRAGTFSILYHQHAQWVGQTVFSPMLNTDTPEDILPLLGTLWQRGVTICLPEMPAVQTIGLPGYSFDRVRYEIQSSDARENAMLPVSYLSVSDFVEKTWRSLLCIDHYDEHAVIFEYGATSMHVISFVDSCNHIYKIGLTAADIYARPAIREHSEFISECVDGIL

SEQ ID NO: 934 - DNA, 4365 bp, Escherichia coli
atgatgtcgggcaatccgttgtcgtggccacaggaacagtgccacatcattgatcaactgtatccttacagtgccgtaaacatcattggtggtgtggtcaccattgagggaattgtcgatctgccccgactacacgcggccatccagtccgccattcggcaatttgatgcgttgcgtatgtggtttgtgatgggagaggagagtgaagtggtcagccaagtgcagccttatcactggcgcgatatccgccatttgactttttccccagattatgacaaggagaacctacgcccagcggcgatcgaaacatttgttgatgagtggttccggcagccctttaccctgctggcgcacgatttgttcgagtttgtcacctttacgtgcggtgaacaatacagcggttatttatttaaagcccatcacggcattgctgatggttggtcaatggcgttgttgtcaaaccatgtcaagcgagcatacgaacagcaggacgtaccagatgatgcgtcaccagcctatagcgcatttctggcgcagcagcaatcttatcaggcgtcaacgcgctttgccgttgatcgtggctggtggcgtgactatatcgacgaataccgcgactgctttccagacagttcccccatcgttactactgagggcatcagttgttccacttggcttgagccagccatgattaaccgtctctacaggttgtgtaatcgttatggctgtacgcttaatacgctgtttattgcactcttcgctctctatcgcgccagagtatggggggaggaaaaaggcgtaataggcgtgccgttagccaatcggcatactcgcgaggcgcggcgttgctttggcatgtttactaatcaattgccgctggcctatcgactggtgcgcacggaacgattctgtgaacgggtggcctttttccagcgcgaactgaaacgcggttttaaacacagcaaatatcccattaccttattcaaccaggatttggcggaacaggggggagggaagttgcgggcgttcgattattgcgttaattattataactttacctatgaacgccacattgcaggtgccgcgcaacgcgtggagagttactacagcggcgagcagtcctataagctacagattgttttgcaaactgttaataatcataaagaaagccttaggttgagtctggaggcgctgcgtagcgctttcactccgcaccaactgacagcgatgaaaaatgggctgttggatttagtcactgcattggatcggcaacctgacgctcgtctaggcgatctcgaagtctatcctgcgccgcacgtcgcattggcatgtggctcactcaaaccctcatttacttcccgatttgcagcgcaagttgtggagcatggtgatcgcacagcactaattgataatgaacagtctttgacttatcggcagttggatgacgctgttgagcgggttgcgcgttatctgcgccaacaggggatcggacgcggtcaagtggttgggattatcgctgagcatagcgctcaaacggtgatggttatttatggtattttgcgctgcggcgcggcatttctgccgctaaatcccgcgttgccaacgacccgcctttacgccatgtgtcgtaaagcgcaggtagcgcatatcctttacgatccggcgatgcatgaattgacgcaggcgctggcgtttcccgcgtccagcttgctccaggccttagccacttcggcgcttgctagagaaccttggccagctattgaaccgcaggatctggcatatgtgctgtttacctccggatcgaccggcgagcctaagggcgtgcaagtctctcatggcaatctggctaactatctccatttcgccgccgaacgttactttacagcgcaggaccgggctgcgctctactcttcgctgtccttcgatttgaccatcactacgctgttcgcccccttatgtgtgggcgctagcatcagcgtttgtcggcacgccgagagcgaaacattgctgcgcatggccgtggttgatcagcccaacacagtgatcaaactgacgcctgcacacctgcggttgttgtgtgcggctggcataagcagtgagcagattcgtaccttggtggttggcggggaggatttcaagcgggatctggcgcgtaaggcggctgctctctttcctcaggccgtgatctataacgaatatgggccgacagaggccaccgttggttgcatgatctatcgctacaccgggcaagaaacgctgccttcattgcccatcggtatggcgatcgacggttgccaggtagcaatttgctccccttggggctgtccggtaccggaaggcgaaactggtgaattggtgatttatggcgcgtcagtgacgcagggctatatcgatgcgccgcaacaaacggccgccgcctaccttaaagataccaatggggtgatgattggctatcgcagcggtgatattggctacgccatcgctcctaatacgctggtttatcagggacgtaaagacgatcaggtcaaaattaatggctatcgtattgagctgtgcgaaatcgaacaagcgttgttgagcgcacctcaggtagaaagtgcggcggtggcggtgattgatgatgtgcaggggcagcacagcgggttgctagcctgcgtgacaccgtcatctgttgatgtagctaccgtaatgcaacatctgcgtcagcaattacccacctacatgcaacccaagcagtgctgtgctatcgcccaactgccgctgtcgcacaatggcaaggtggacgtgcgtcagatggtcgcaacggtccgaaacaccgcgcctgcatcgggtagcgagcggctgggagatgcggcgataaggcattcagttcgggtatgtgtggaaggggcgctggagcaaactgagtttgatgataacgaaaatctttatgtcttggggttggactccatcaagagtatccagattgcagcgcagctcaggcaccacggctggacgatgtcagcggtgcaggtgatggagtgtggaacagtgaacgccatctgtgagtttctcgctagtcatacaacggtgtcacagctcgcgcagtatgctcataacacccgtatcgatctacccgcattgcgttggtttacgcagttggcgttgccagtgcccaatgtttataaccatgtcattgtgctgaaagtgttgccgggcttgcccgctcgagcagttacacaacaggctgcatacattaatccagcagcagccagctttgcacagtgcgctggacgctgaggggcggttgctagtatgcgacctaatgtgtgttatcccaacgaggtgctcacggaatattcgacggcgcagtggacgttggcagaggtgatcgctcagtgcaatagcatgcttgacgtgacaaatggtcgagtctttacggcagctctgttacacgccccgcagcctgcgtctagcacgctggtactctgtgcccatcacttgtgcgtcgatatgcactcttggtatttaatcctcagcacgctggacgccgtcagcactgtcaatggcaccagcaacagcggactgcatcgctggaatgactatctggcgagcaaaacggtagattccgccacacacgaaagctggcgcacagtatgtcaaacgctaccgctgcatttcccacccgtgtcattgccagatgactcattacctcgtacgcgcgcttggcgtgaagactttcgccatccttgcgtcaggaggttgtttgaatccagtggtaataccgcgtacagcgccgaaacctatgtgctaacggcattggcgctggtgctgcgttactacagcgaagagccttggtgtcgcatcgagatggaaggcatgggacgcggctgctggcccgatgagcctgacgttgcggatacggtcgggtggtttactctattttatccttgggcgatccctctgcatggcgatatggcgacactgttatctgcgatcgcttccgatttggcaaaacgcacgcatggtgggggagattacggtctgctgcaaatgcggcatgcaccggaagactctcttgcgcaagggatccgaatgaattacatcggtgtgcaggcgcaaccttcactccgctattttcatattgatcactttaatagtgatatctataccgcgcctgaaaacgcgctcggctgcgtgctggagtttaatattgcgcgctcggcagctgatggtctctccttccactgccgtttcgatcccacgcgcattgcgctgaatgatgtgcaactcctgctggcgcgctacaagaacagcctcactgatctggatgcctggctgtgccaacacagcgccacgctgacgggcgcgccgactttgtggacacta

SEQ ID NO: 935 - protein, 1455 aa, Escherichia coli
MMSGNPLSWPQEQCHIIDQLYPYSAVNIIGGVVTIEGIVDLPRLHAAIQSAIRQFDALRMWFVMGEESEVVSQVQPYHWRDIRHLTFSPDYDKENLRPAAIETFVDEWFRQPFTLLAHDLFEFVTFTCGEQYSGYLFKAHHGIADGWSMALLSNHVKRAYEQQDVPDDASPAYSAFLAQQQSYQASTRFAVDRGWWRDYIDEYRDCFPDSSPIVTTEGISCSTWLEPAMINRLYRLCNRYGCTLNTLFIALFALYRARVWGEEKGVIGVPLANRHTREARRCFGMFTNQLPLAYRLVRTERFCERVAFFQRELKRGFKHSKYPITLFNQDLAEQGGGKLRAFDYCVNYYNFTYERHIAGAAQRVESYYSGEQSYKLQIVLQTVNNHKESLRLSLEALRSAFTPHQLTAMKNGLLDLVTALDRQPDARLGDLEVYPAPHVALACGSLKPSFTSRFAAQVVEHGDRTALIDNEQSLTYRQLDDAVERVARYLRQQGIGRGQVVGIIAEHSAQTVMVIYGILRCGAAFLPLNPALPTTRLYAMCRKAQVAHILYDPAMHELTQALAFPASSLLQALATSALAREPWPAIEPQDLAYVLFTSGSTGEPKGVQVSHGNLANYLHFAAERYFTAQDRAALYSSLSFDLTITTLFAPLCVGASISVCRHAESETLLRMAVVDQPNTVIKLTPAHLRLLCAAGISSEQIRTLVVGGEDFKRDLARKAAALFPQAVIYNEYGPTEATVGCMIYRYTGQETLPSLPIGMAIDGCQVAICSPWGCPVPEGETGELVIYGASVTQGYIDAPQQTAAAYLKDTNGVMIGYRSGDIGYAIAPNTLVYQGRKDDQVKINGYRIELCEIEQALLSAPQVESAAVAVIDDVQGQHSGLLACVTPSSVDVATVMQHLRQQLPTYMQPKQCCAIAQLPLSHNGKVDVRQMVATVRNTAPASGSERLGDAAIRHSVRVCVEGALEQTEFDDNENLYVLGLDSIKSIQIAAQLRHHGWTMSAVQVMECGTVNAICEFLASHTTVSQLAQYAHNTRIDLPALRWFTQLALPVPNVYNHVIVLKVLPGLPARAVTQQAAYINPAAASFAQCAGRZGAVASMRPNVCYPNEVLTEYSTAQWTLAEVIAQCNSMLDVTNGRVFTAALLHAPQPASSTLVLCAHHLCVDMHSWYLILSTLDAVSTVNGTSNSGLHRWNDYLASKTVDSATHESWRTVCQTLPLHFPPVSLPDDSLPRTRAWREDFRHPCVRRLFESSGNTAYSAETYVLTALALVLRYYSEEPWCRIEMEGMGRGCWPDEPDVADTVGWFTLFYPWAIPLHGDMATLLSAIASDLAKRTHGGGDYGLLQMRHAPEDSLAQGIRMNYIGVQAQPSLRYFHIDHFNSDIYTAPENALGCVLEFNIARSAADGLSFHCRFDPTRIALNDVQLLLARYKNSLTDLDAWLCQHSATLTGAPTLWTL

SEQ ID NO: 936 - DNA, 1437 bp, Escherichia coli
atgacggtgaataagcttgagccagacaacggcacgccgaacgatgagctgttcacggtggcgggtatgtttgacggctcgctgtataaattactcctgcgcatggcgttgccgatgtttgtcggtatgttaacgcaggtgacctatgccatcgccgatattttttggctgagccacattgatgtcaccaacagcggcatcattgccggtgtggggctggttttccccgttggaatggggttatttgccatcgccaacggcattcaaatcggtatgggatctttgctgtcccgcgccatcggcatgcagcggttggatcgtgcacagcggattttgtcggtcggtatcatcatcgcgctattctttgcgatcgtgatcaccgtacttggctatgtttatgcccagccgctattgcgctcactgggggccacgaagagcatcatcggctacgcaacggagttctattattattcgctgctgaccgtgttcagcatcatgttgattggcgtcatgatggggctgtttcaaggcgcgggtaagatcatggtcatcatgaaggcctcattgttgggggcgttggtaaatattatgctcgatccaatcatgatctttgtattcgattttggtgtgaaaggggtggcattggcgtcgtttctggcgcaactgagtatggtcgcctatttcatctacacattgatgggattacatatcgggttgagtatacgcatcgcgttacgcccattctcctggaaaatctaccgagagtttctctccgtcggcatggcgcagatgctgatgcaactgatcattgcggtcggcatagtgatttataatttttttatcgtcaggctggacgtaaacgcgatggcagcgtttacgctcactggtcgcatcgactatttcatcatcacgccgatgctggctatcgcgaccgcgttgctgactgtggtggggcaaaactggggacacggaaatgtcacccgcacgctgaatgcctattgggccgccgtcgcgctggccttctctattgtgctggtgttagccgttatgcatattgtactggcaccctggatgtatcccctgtttactcgtgttgttgccgtgagtgactatgcggtactgcaaacccgtatcatggcactggcactaccctttgtcgctatcagcctgttagcaagtgaatattatcaggccattggtaagccttggtattcggtgttgttgacgctgatgcgtcacgtgtttatatctgtccctgtcgtatacctgctggcgattgtgttagagatgcgtattaccggcgtctattttggggcgatgagcggcacttttgtggctgcgttgttggcgtggcgtctgctgcgtctttcacctcgtctgctgcgatggaatcaggaggcggtgcgctcccaacacttggatatggaggtggcacca

SEQ ID NO: 937 - protein, 479 aa, Escherichia coli
MTVNKLEPDNGTPNDELFTVAGMFDGSLYKLLLRMALPMFVGMLTQVTYAIADIFWLSHIDVTNSGIIAGVGLVFPVGMGLFAIANGIQIGMGSLLSRAIGMQRLDRAQRILSVGIIIALFFAIVITVLGYVYAQPLLRSLGATKSIIGYATEFYYYSLLTVFSIMLIGVMMGLFQGAGKIMVIMKASLLGALVNIMLDPIMIFVFDFGVKGVALASFLAQLSMVAYFIYTLMGLHIGLSIRIALRPFSWKIYREFLSVGMAQMLMQLIIAVGIVIYNFFIVRLDVNAMAAFTLTGRIDYFIITPMLAIATALLTVVGQNWGHGNVTRTLNAYWAAVALAFSIVLVLAVMHIVLAPWMYPLFTRVVAVSDYAVLQTRIMALALPFVAISLLASEYYQAIGKPWYSVLLTLMRHVFISVPVVYLLAIVLEMRITGVYFGAMSGTFVAALLAWRLLRLSPRLLRWNQEAVRSQHLDMEVAP

SEQ ID NO: 938 - DNA, 1461 bp, Escherichia coli
atgagtgagcagagctatcgtagcgcagggacactgttggcacagttggcgtccggagaaaccacctcagtggcgttggtgaatcactatttttcacgtatggcgcagtttaacaagccgttgaatgcggtggtgcagcagcactatgcgttggcgttggaggccgccgcgcgcgccgatcgtgagcgactggaggggcgcgcaaggggcgtgttgcacggattaccttgtactgttaaggagtcgtttgacgtgcaagggtggttaaccacgtccggtgcccattatctgaaagataaccgggcgacgcaggatgctccttccatcgcacgcttacgcgctgccggggcgatcctgatgggaaaaaccaatgtgccgatgatgactgccgattggcaaacctataacgatctgtatggcaccacccataacctgtgggataggcaacgttcacccggcggatcgtccggaggagcggcggtggcggtggcggcggatttcacccccgtggaatttggcagcgatttgtttggctcactgcgcattcccgcacactacacaggtgtctatgcccatcgttgtagcttggggttgatgtcggtcagaggacatgtgcccggtggtggtccgcaagcgactgatgagccggatctctcgacggcgggccccatggcgcgcagcgcggcggatctgcgtctgatgatgcgcgcattgagcacattctgggtggaaccgccgcgtattcccgattttagccgttatcaggccaaagcaaactaccgcgtgtgcacgtggtttagtgcgccccaccatgagatagatcaacagatcgcacagcgttttcaatcgtttatcgacaagttacgcgcacagcctggcgtggaggttgatgatgctatgcccgccgatatcgatcccgacgcactgtttgatatagcagtcaaactcagtggtcggctggtaagtacggcgctcaatggacgccagcgtcttacagccgggctggctgcgctgggcttcaggcttgtgggcaagctggcggatgtgcctgaggggataacgagctattaccagggcatgctgaaagacagtggcgaacagcggaatacagacaaactccgccacgaatacagccgggtgatagaaacccttttcgcgcgttatgacgtgttgttgacacctgtcagcccggtgctggcgtttgcgcacatgcagcagccggtgcgtaagcgcaagcttatcgtcaatggcgaaccgcaagattacaacgaacatttgttctggaacatgttagcaacggtttttggtttgcctgccaccgtttacccattggcgaaaacgatggatgagcttccgtgcggcatacagatcatttccgggcattttcacgatgatgtgacgattaactttgctgagttctgcgaaagcatcagtggcggattcacggtaccggaagggtac

SEQ ID NO: 939 - protein, 487 aa, Escherichia coli
MSEQSYRSAGTLLAQLASGETTSVALVNHYFSRMAQFNKPLNAVVQQHYALALEAAARADRERLEGRARGVLHGLPCTVKESFDVQGWLTTSGAHYLKDNRATQDAPSIARLRAAGAILMGKTNVPMMTADWQTYNDLYGTTHNLWDRQRSPGGSSGGAAVAVAADFTPVEFGSDLFGSLRIPAHYTGVYAHRCSLGLMSVRGHVPGGGPQATDEPDLSTAGPMARSAADLRLMMRALSTFWVEPPRIPDFSRYQAKANYRVCTWFSAPHHEIDQQIAQRFQSFIDKLRAQPGVEVDDAMPADIDPDALFDIAVKLSGRLVSTALNGRQRLTAGLAALGFRLVGKLADVPEGITSYYQGMLKDSGEQRNTDKLRHEYSRVIETLFARYDVLLTPVSPVLAFAHMQQPVRKRKLIVNGEPQDYNEHLFWNMLATVFGLPATVYPLAKTMDELPCGIQIISGHFHDDVTINFAEFCESISGGFTVPEGY

SEQ ID NO: 940 - DNA, 4305 bp, Escherichia coli
atgttgctggcgctgtggatgcgctatttgccgataaaaaacgtcgatcctgagtgcgatttctttcgcttggggggacattcgctgttggcggtaacgttggtagcagagatcaaccgcacttttcactgcgccttgaccctgaaggacattttccactactccacactacgggcactgagtgcgcgtattgcacagcaatctatcacggacgctgccgcgtctcaggatgactgggtgatagtgcacgaccctgagcatcgtcatcaaccgttcccattgacggatgttcagcgcgcctactggcttggacgacagacgggtgctacctcgatcgcgacccacatctaccatgaatttgacgtagaacactttaatgttacgcgttttacccatgcggtgaatgcgctgatcgctcgccatgaaatgctacgtgcgcgggtactccccgacggtactcagcagattctggcgcaagtgccggcgtatcagttagagcagcgcgatctgagtgctttgtcccctaacgcacgaaacgatgccttgatggcgatccgcgatcggctgtcgcatcatgtgcatcccgcagatcgttggccgctgtttgatttcagttattcggcttgcacggcgcaacatggccgcttgcatttcagtctcgatctgctgattgccgatgctctgagtatgcgcacgctacagcaggagttgatgatgctgtaccgtgagccccatgtgtcactgccgttgctaccgttctcttttcgtgactacgtgcaggcgctgttggtagagcaggcgagtgaagcctatgcacgcgatcaggcctattggcaacgggcgctgccgcagctgtatggcccaccaacgctgcccgtacagggcgatttggcgcaactgtctgcgatcaggttcgtacgtcgccgtcatcggctgtcagcccacaactggggagtgctgagcgcgctggcccaacgcacacgtatcaccaagacggcattgttgttgacagtctttagccaagtgctggcacgttggagccttagcccgacgtttacgctcaatctgacgttgttcaaccgcccgcagggttaccccaacgcagaggcagttattggtgattttaccgctgtcagcttgctgaatgtttgttacgacagccagcactcttatgcccacaacgctcagcgtattcaggtgcaactgtgggaagatctcgaacatcgtcgtttcagtgggatccgcgccagcgaggcgctgatccatagcggtcgtttccatgcgccgatgccggtggtattcactagtatgttggatatcgacggggagacgactgcgcaagaccctcgggacacaacccgttttactctgtgtccggacgccaatattacccaaacaccgcaggtgtggctcgatcaccaggtgatcgagttggctggggagttgcatttcaactgggacgcggtcgagcaactgtttgataccacgctgctggatcagatgtttggtgcttattgtcatgcgctgcaggcgctggttgccatgccgcaaagttggtggggggtaaatagttctctggcgctgcccaccgttagtgcaccggtcacgcaggctcctgcacctacggccttgttgcaccatggattactgcgtcaggcagcactgacgccacaggaaactgcgctgatcagtcctatccgtgaattgacctatcgccaactgtcgacggcggcggatcatgtggcccgcgccctgttagcgctgggcgtgcagcatggcgaccgcgtggcggtggtgatggaaaaaggctggcagcagattgccgccgtacacggcattttacgactgggtgcggtctatctgccagtggatccggtgctaccgccacagcgtcgccagcttttgctgacggtgggcgaggtgcgggtacaagtaacgcagccgggtctcacgcaattggagccgtcgctgcccgtgctgatcatcgacgacggaatgctggacacgcctgctgcgccgttgcctgaagtggctggggatgtcacggatctggcctatatcattttcacttccggctccaccggtaccccgaaaggagtgatgatcgaccaccgtgcggccatgaacacgctggaagacatcaacgaacgctttggcctcaatgcgcaggatagggtgttcgggctgtcatcattgagctttgacctgtcggtttacgatgcctttgcgccttttatggtgggtgcagcgctggtactgccggaagcaggacgggaaaaagatccgcgtcattggcagacagttatggcacacggtcatgtaagcgtctggaatgcagtgcccgcactgatgcagatgctgtgcgaataccacagcggcgatcggatgagttatccgacgttgcgtctggcactgttgagcggcgactggatcccgctaacgttaccggagcagatgcgcgagcggctcaatgaaacgatggacatcatcagtctgggtggagcgaccgagtgcgccatctggtcggtctactacccgataggtgaggtggaatcgacgtggaccagtattccctacggtcggggcctgcgcaaccagccagtatacgtgctaaatgcgcaactggaggaatgtccggtcggggtggaaggagagatttgcattggcgggatggggctggcacaaggctacctgaacgacgcagagaaaacggcggcgagctttgtctggcgcgaagcgagtggtgagcgaatttaccgcactggggatcgcgggcgctactttgctgacgggcaagtcgcctttttggggcgcaacgatacccaagtgaaggtgaatggttaccgtatcgaactgggggaaatcgagcgctgcattgcgcgacatcccgatgtggagcagtcagtggtggtggcagtgggtaattctcaacatcgtcggctggtcgcttttgccaaactgcacgatcgccaccaggcgcaggcattgcaagctaaggaagcggaggcggcggcactggcgcagggtattattgtgaatccggcacagcgtctagcgttcaaactcaaggagccacatattcgcgcgctggatggtctgggcattgcactgacggcaccggcggatagcacacgttacatcaaacgccgcagctatcgtcatttcagcgcgcaaaaaaccacgctggcacagttggggcaattgctgtcgggcttggggcagatgcgtctacccggtctaccttttgccaagtatgcctatgcgtccgccggggggctatacccggtgcaaacctacgtgtacctgcatccagacaagatcgaagagggagtatccggtatttactacttcgacccgcgacagagctgtcttatgccggtagcaccagaagtcgagctgaacagtggttttcatgccggacctaatcagtctattgccgatcgggcggcattcacgctgtttatggtggctgatatggcggtgatctcgccattctatgggcaagaggcagcttggcacttctcggtgatggaagcaggtactctctgccatttactggaagaagatgcgccgcgctacggattggggctgtgccaacttgggatggcagacttttccgctgtggcatcgcattttcaattgtcgccacatcatcgctatgtccattgcaccgtggggggcgcgatagggcaagaggcggcaagtgctgcagcattgctgcgcgatttctccacctatgagaaaccgaaggaaaccgctgcgccgctggacatgcagagctacaaagatgccatgctgcgcggcctgcgtcagcaactgcctgactatatggtgccgagtgatctgatgttagcgaccgattttccgttaaccgctaacggcaagctagatcggcaaaaattacagctgcagggcgaacaaattgcccaccagcgtgacggcgtgggtccaatccaggtggacagtgcgttacaacagcggctggtggcgctctggcaggaggtactcggcgtgagccacgtgtcggccgaagacgatttcttctcgctggggggcagttctatagaattggtgcgtattcagcaggcacttgaggcgattatcgggcaggagattcccattgtcgatctgttccgtctgccaaccatcgcggatgtggcgcgttaccttgatgagcaactgcacaatctacccgccgcccacgatatcgtattagcgcaggctgaggtttcgcaggtcagcgctgcgcgcgagaatctggcgttgcggcgtaaacgtgcccaacagggagaaaagggcgatgag

SEQ ID NO: 941 - protein, 1435 aa, Escherichia coli
MLLALWMRYLPIKNVDPECDFFRLGGHSLLAVTLVAEINRTFHCALTLKDIFHYSTLRALSARIAQQSITDAAASQDDWVIVHDPEHRHQPFPLTDVQRAYWLGRQTGATSIATHIYHEFDVEHFNVTRFTHAVNALIARHEMLRARVLPDGTQQILAQVPAYQLEQRDLSALSPNARNDALMAIRDRLSHHVHPADRWPLFDFSYSACTAQHGRLHFSLDLLIADALSMRTLQQELMMLYREPHVSLPLLPFSFRDYVQALLVEQASEAYARDQAYWQRALPQLYGPPTLPVQGDLAQLSAIRFVRRRHRLSAHNWGVLSALAQRTRITKTALLLTVFSQVLARWSLSPTFTLNLTLFNRPQGYPNAEAVIGDFTAVSLLNVCYDSQHSYAHNAQRIQVQLWEDLEHRRFSGIRASEALIHSGRFHAPMPVVFTSMLDIDGETTAQDPRDTTRFTLCPDANITQTPQVWLDHQVIELAGELHFNWDAVEQLFDTTLLDQMFGAYCHALQALVAMPQSWWGVNSSLALPTVSAPVTQAPAPTALLHHGLLRQAALTPQETALISPIRELTYRQLSTAADHVARALLALGVQHGDRVAVVMEKGWQQIAAVHGILRLGAVYLPVDPVLPPQRRQLLLTVGEVRVQVTQPGLTQLEPSLPVLIIDDGMLDTPAAPLPEVAGDVTDLAYIIFTSGSTGTPKGVMIDHRAAMNTLEDINERFGLNAQDRVFGLSSLSFDLSVYDAFAPFMVGAALVLPEAGREKDPRHWQTVMAHGHVSVWNAVPALMQMLCEYHSGDRMSYPTLRLALLSGDWIPLTLPEQMRERLNETMDIISLGGATECAIWSVYYPIGEVESTWTSIPYGRGLRNQPVYVLNAQLEECPVGVEGEICIGGMGLAQGYLNDAEKTAASFVWREASGERIYRTGDRGRYFADGQVAFLGRNDTQVKVNGYRIELGEIERCIARHPDVEQSVVVAVGNSQHRRLVAFAKLHDRHQAQALQAKEAEAAALAQGIIVNPAQRLAFKLKEPHIRALDGLGIALTAPADSTRYIKRRSYRHFSAQKTTLAQLGQLLSGLGQMRLPGLPFAKYAYASAGGLYPVQTYVYLHPDKIEEGVSGIYYFDPRQSCLMPVAPEVELNSGFHAGPNQSIADRAAFTLFMVADMAVISPFYGQEAAWHFSVMEAGTLCHLLEEDAPRYGLGLCQLGMADFSAVASHFQLSPHHRYVHCTVGGAIGQEAASAAALLRDFSTYEKPKETAAPLDMQSYKDAMLRGLRQQLPDYMVPSDLMLATDFPLTANGKLDRQKLQLQGEQIAHQRDGVGPIQVDSALQQRLVALWQEVLGVSHVSAEDDFFSLGGSSIELVRIQQALEAIIGQEIPIVDLFRLPTIADVARYLDEQLHNLPAAHDIVLAQAEVSQVSAARENLALRRKRAQQGEKGDE

SEQ ID NO: 942 - DNA, 1954 bp, Escherichia coli
atgacgatacatcatgccgcattggcgcgaatgttaccggcggaaaaaaaggaaaagctattacgacagttggcgcaatcaggcgtgtcgcccagccgcattcccatcatcaaagcggatccggcgcaggcaatcccgctgtcgtttaatcaggagcggttgtggtttttgcaaaaatacgacagtaccgccactaactacaacctttatgtggtgtatcgtttgcatggcgtggtggatatgccgatgctcacggaggcattgcgccatgtgcaagcacgccacgccatcttgcgtacccgtatcatagtacgtaacgatcggccttgccaggtgatagatgatgcgtcttcgttagttctcgatacggtcacgctggcagcgcaggccccaacttcagcgctagatgcggtaattcagcaggtgataaacacccggttcgatctggcacgcggtcctctgtggggggtaactcagattattcaacccgatcaaggttgtcatttggtgttttgcgcgcaccatatcatcatcgacggtatctcgttacggctattgttcgatgagttacagcagcagtatgctcgattgcatgctggtaatgaaacgtcgctgcctccgccgccgctgcaatatgccgattatgccttctggcagcgcgaatggttccaggataccttgctggcgaacgaacttgcctactggcgtgcgcgtttgcaagacgcgcctctgctgtcgacatttccatcgctgcacccgcgcccggcacaaccctctacacatggttcccggttcagcatcaccctggatgaaacattaagcctcgcgttgaaacacgtagcccgcacgcaggaaacaacgccgttcgtgctgatgctgactgccttccaactggtgctgatgcgttacgctcagcaacagcgattggtgataggcatgccagtatcggggcgcattcgcccggaattgcagagtagcattggttattatgccagcactgcggttatctacaccgattttaatggggttgaggtagggcgcgaggcgctccagcgtgtgaaggccagcgtgaaagagacgcaggggcgccagcaactgccgtttgaaaacttggtgaatatgctggatctccctcgcagcctttcccattcaccgttgttccagatcctctatatctaccataaccacgtgaccccacgcgcttttaccttggctggtgcgtattgggagcaggtgacgtatcacaatcagaccgtcaaatacgacatgacagtcgaggtgttccaaaacgacgccacgttcgacgtctcctttgagtacgatttggggttatattggcgtgctgttgccacgtcacagggatgtgattgcaaccatgttggcgacgtggtttgtgggggcgtgctacgtgccgttcgatattcatcagcctgccgcgcgtttgcaacgccttatgcaacgcgcgcgtttggtctgtctggtggtccgtcagccgggagagtggggtgaaattgtacaactgtcgttgccggaattgatgcaggacatgtcgaatgcgatccggtattctacaccttgcgcgctgttgccggatatgcaggcctacctgttgtttacctccggcagtaccggtgaacctaaaggcgtgtgcgttgttcaccgcgggttgcttaacttgttgggatatcagcgaccttgcggttggctcgcaagacggctgctctcggtgacgacgccaacatttgatatctcattcttggagtatctgttgccgctgatctccggtgcgagtctctatctgacagaggcggaacgcgccgcagacagcttccgtatgattccgctgattgccgactatcgaccaacgctgatgcaggcgacgccctcgttctggcacgggctgttgatggcgggttggcgtggcgacccggaactatgtgtgctggcaggccgg

SEQ ID NO: 943 - protein, 760 aa, Escherichia coli
MTIHHAALARMLPAEKKEKLLRQLAQSGVSPSRIPIIKADPAQAIPLSFNQERLWFLQKYDSTATNYNLYVVYRLHGVVDMPMLTEALRHVQARHAILRTRIIVRNDRPCQVIDDASSLVLDTVTLAAQAPTSALDAVIQQVINTRFDLARGPLWGVTQIIQPDQGCHLVFCAHHIIIDGISLRLLFDELQQQYARLHAGNETSLPPPPLQYADYAFWQREWFQDTLLANELAYWRARLQDAPLLSTFPSLHPRPAQPSTHGSRFSITLDETLSLALKHVARTQETTPFVLMLTAFQLVLMRYAQQQRLVIGMPVSGRIRPELQSSIGYYASTAVIYTDFNGVEVGREALQRVKASVKETQGRQQLPFENLVNMLDLPRSLSHSPLFQILYIYHNHVTPRAFTLAGAYWEQVTYHNQTVKYDMTVEVFQNDATFDVSFEYDLGLYDADVVKQIAEALRQHCLSLTSSLETPIGAIPLHAPETATPRRDPLNATNVPWLGPQDVLRIIEQRCVQHPKQLAIQQHDGTLTYAELWARVQFIAMRFRAHGIQPGDRIGVLLPRHRDVIATMLATWFVGACYVPFDIHQPAARLQRLMQRARLVCLVVRQPGEWGEIVQLSLPELMQDMSNAIRYSTPCALLPDMQAYLLFTSGSTGEPKGVCVVHRGLLNLLGYQRPCGWLARRLLSVTTPTFDISFLEYLLPLISGASLYLTEAERAADSFRMIPLIADYRPTLMQATPSFWHGLLMAGWRGDPELCVLAGR

SEQ ID NO: 944 - DNA, 3030 bp, Escherichia coli
atggcagagaatgattttggtatagctatcattgggatggcggggcgtttccctcaagccgatacggtacaggcgttttgggaaaatcttctggcaagccgagagtgcatttccttttacagcgatgaggaactgctggcgatgggaatcagtcctgaatttgttcagcacccagattacgtcaaggccaaaggggaggtagctgacatcgataaatttgatgctgctttcttcggtatcgcaccccgagaggcggagctgatggatcctcagcaccgtgtcctgttggaaaccgcgtgggcagccttcgaagatgcgggctatgtggctgccgattatccgggggatgtgggtatttttgctggcaaaagcatggattcctatttgatgctgaacttgatgccgcactttaaacgcgttttctcttctggcagtttgcaggcggccattggtaacgacaaagacagtatcactactaccatcgcctatcacctcaacctgcgcggcccggcgatcacggtgcagacttcctcatcgacatccttggtggcggtgtgcgtggcatgccaaagtctgttgacttggcagtgtgacatggcgattgctggcggagtaacgctggggccaccagcaaaaaccggctacttgtcgcaggaaggtgggatcaccgccgccgatggccactgtcgggcgttttccgataacagcagcggatttgtgcccggcaccggcgcggggctggtggtgttaaagccggttgatgaagcgctgcgtgatggcgataacatctatgcggtcatcaaaggatttgccgtcaacaacgacggttcggagaagatcagttataccgcgccgagcgtggatgcccaagcgcgcgccattgctcaggcacagcggttggcaggtttgacaccgcaggatatcacttatgtggaagcccacggtaccggtacgcgtttgggcgatccggttgagttttctgcgctaagccaagcctttgcgggcgcgtcacaaaagcagtactgtgcgctggggtcggtaaaaaccaatatcggccatttggatacggcagcgggcgtcgcagggttgataaaaaccgcgctggcagtgcagcagggaataattcccgcaacattgcactttgaacggcccaatgcacagatcgatctgaccaatagtccgttttacatcaacactacctgtcaaccgtggcaaccggaaagcggcatccgtcgcgcgggcgtcacctcgcttggcatgggcggcaccaatgcccatgttgtgctggaacaagcgccagccgttgacttgcaagcgcgagcgcctgtacctgcctacagtattttgccgttttctgccaagaccgacagtgccttatcctcggggctggcgcgttttgccgattttctgcaacatgaatcgctgccggataggcgggatctggcgtggacactctcacagggacgtaaagccttcgcacatcgcgccgcgctcgtaaccagagatctacatgctgccgggacgctgttgcagcaggccgcgacagcgccgtttgctcgtggtgtagcgcagacacagctcgggctggggctgttgttttccgggcagggtagccaatatcagcgcatgggccatcagctctatcaggtttggccggcctacgccgatgccttcgaccgttgcgcgacgttactcgagcgtgaataccaactggatatccgccatgagttgttcagagcagaagtctcgttagcccaaggcgaacgccttgcgcaaacctgcctcacacaaccgctgctgttcagcgtcgagtatgccttagcccaattgtggctcagttggggaatcacgccaacggtaatgattggtcattcgctgggcgaatgggtggcagcgacgttggcaggcgtgttctctttagaggatgcgttgcgcttggtggcgcgtcgagcagagctgatgcatcaggcaccaagcggtgccatgttgatggtggcgctgcccgaagcacagattcgcgcactgattaccgccccgctggcgattgccgctgttaacgcccctgactattcggttatcgccgggcctacgtcggagatcctcgccgtcagccagcgtctgacggagcagaacatcatcaacaaacgattgcatacctctcatgccttccactctagcatgatgcaagatgcggcgcaggcgctacgtcaggcatttgagaatgtacgactgaacccgccgacgctcaccatcatctctaccgtaaccggcgcgcacgtcagtgccgacactctcaccacaccggactactggattgaacagatgctgatgcctgtgcagttctccgctgcactgcaagaggcgcaagctacatttgatgtcgattttctggaaatcgggccaggtgccaccctgacccagctgaccaacggtcatgcattaggtgatcgtctcgcgttcagctcgctgccagcaggtgcccgcagcagcgatgagcacaaacatatcttagataccgtggcagcgctttgggtgcgagggcataacatcgatttgtctgcgtttgcaggtgagcaaccgcgccgtgtctctctaccgacctacgcctttgacaaaatccgttactgggtcgacagtccagaagaacagaggagcgccgtaacgccggtggcggacgcgggaagtgtcatccctagcgaaccgtcggtgcgccgtcagccgcgtccggcgttttcggtgccttacgcggctccagagagcaaaacgcagcgcggcttagtggcgatttgtgaagcattgctgggaattgacggcttgggcattgacgacaacttcttcgaagctggcggacattcattgatgctgggcatgttgctggcgcaggtacaggaacggttcgccgtcactctttcctttttcgacgtgatggaggatgccagcgtgcgcgcgttagcgcagttggtcgagcaggagcagcaggatgatggagggtccgcacttgccgtgctagttaacgacatgattaatgag

SEQ ID NO: 945 - protein, 1010 aa, Escherichia coli
MAENDFGIAIIGMAGRFPQADTVQAFWENLLASRECISFYSDEELLAMGISPEFVQHPDYVKAKGEVADIDKFDAAFFGIAPREAELMDPQHRVLLETAWAAFEDAGYVAADYPGDVGIFAGKSMDSYLMLNLMPHFKRVFSSGSLQAAIGNDKDSITTTIAYHLNLRGPAITVQTSSSTSLVAVCVACQSLLTWQCDMAIAGGVTLGPPAKTGYLSQEGGITAADGHCRAFSDNSSGFVPGTGAGLVVLKPVDEALRDGDNIYAVIKGFAVNNDGSEKISYTAPSVDAQARAIAQAQRLAGLTPQDITYVEAHGTGTRLGDPVEFSALSQAFAGASQKQYCALGSVKTNIGHLDTAAGVAGLIKTALAVQQGIIPATLHFERPNAQIDLTNSPFYINTTCQPWQPESGIRRAGVTSLGMGGTNAHVVLEQAPAVDLQARAPVPAYSILPFSAKTDSALSSGLARFADFLQHESLPDRRDLAWTLSQGRKAFAHRAALVTRDLHAAGTLLQQAATAPFARGVAQTQLGLGLLFSGQGSQYQRMGHQLYQVWPAYADAFDRCATLLEREYQLDIRHELFRAEVSLAQGERLAQTCLTQPLLFSVEYALAQLWLSWGITPTVMIGHSLGEWVAATLAGVFSLEDALRLVARRAELMHQAPSGAMLMVALPEAQIRALITAPLAIAAVNAPDYSVIAGPTSEILAVSQRLTEQNIINKRLHTSHAFHSSMMQDAAQALRQAFENVRLNPPTLTIISTVTGAHVSADTLTTPDYWIEQMLMPVQFSAALQEAQATFDVDFLEIGPGATLTQLTNGHALGDRLAFSSLPAGARSSDEHKHILDTVAALWVRGHNIDLSAFAGEQPRRVSLPTYAFDKIRYWVDSPEEQRSAVTPVADAGSVIPSEPSVRRQPRPAFSVPYAAPESKTQRGLVAICEALLGIDGLGIDDNFFEAGGHSLMLGMLLAQVQERFAVTLSFFDVMEDASVRALAQLVEQEQQDDGGSALAVLVNDMINE

SEQ ID NO: 946 - DNA, 4773 bp, Escherichia coli
atgagacagttgcctaccgacgaccaaacgatagtcgactatttgtatcgtatcgccggagaatatggggaaaaagccgctgtattgatgggggacgcggcgctgagctatgatcttaatgcacgctctaaccaactggcgcattatctgcgtgggctggggatcggcgaggatcgtgtggtagctatccgcctgccgcgcggcatggcaatgctgattgccattttcgctattgtaaaagctggtggtgcctatttaccgctggcgtacaatgcaccgcgtagccgcattgaaaatatactgagcaacagcggcgctgtttgtctgatcggtactgacgatggtgatcgctggccgattcctcgcgtcgaaatcgacagcgcggcggtcagtgccatgccaacgacggatctgcgttaccgaccacatgcgcggcaactggcgtatattatttacacctccggttccaccggtgtccctaaaggggtggcgacggaacatgcagcgctgctaaaccgaattgtctggatgcagaacgcttatcctatcagttctcaggacgtgctgtttcagaagacggtgtacacctttgacgtctctgtctgggagatgttctggtgggcgatgtacggcgcatctgtagtgctgttaccgtccggactggagagcgatccgcgaaccttggctcgactgattcagcgtcaccgcgtgtcggttgtgcactttgtcccttcgatgctgaacctgtttgtcgagtatctggagatgaaacaggatcctcgtttgaccgcctcattgcgattagtgttttccagcggtgagaaactcacggtccacagtgtggctcgcttttatcaatcggtggcgcagggtgatcttataaatctctatggcccgaccgaagcagcaatcgatgtcagtcatcaccgctgcctgcgcgggtacgactacgacgatatccctatcggtcaagcgattgacggttgccgactctatgtgctggatgaccatggtaatccggtagcagacggcgaagagggcgaactgtatctcgctggtatcgggctggcacgtggctatctcaacaacgtggcgttaactgatcgctgttttactatacatccaactttgcgccatttagggaaaccggagcggctgtataaaactggagatctggtgtggcgcgacggggaaagccaacaaattcattacattggccgtaatgattttcagattaaaattagagggttgcgcgttgaattgggagaaatcgaagcccatgcgatgcgtttcccgggggtacagcaggcagtcgtggtggcggatcaggatgatcccgacaatcagttgatttacgcttttgtcgtcagtagcgtgccgctcaatttggcggccttaatggacgcactgtccaaaaacttgcctgcctacatgctgccgaaccgtttgttggcaatgtcagagttaccactctccgacaatggcaagtgctgtcgtaaaacgttgctcgacttggcgcgggcgtactcagccagtcgcgtcgatttacgtgaaactcccgccgtgcgctacctaccgttgtcatcggctcaatcgtcgatgtggtttatgcaacaattggcgccgcatactgcactatacaataaccctaccgccttgctgcttgaaggagaactggatcgcacgcggatggacggcgcgattcgtcaattgatgagtcggcatactctgttacgtgctatggcggaaacccacaatggacaaccagtattggcggtgcctcagtgcgtatcgtcgcaggcgttgctgaccatagtgccactcccctcggtgagtgatgataacgcgctacaggcgatgatcaaccagcgtgcggcacaccccatgcccttaacgtcaggcacaccgctgtgccggtttgaactgttgacgctcgatgacgatcgtagcgtattgttgattcatctgcaccacatcatcagtgatggctggtcgaaaggcgttttgttacgcgaattgcaggccgcatataacggtgaatcgctgacgccagaaccgttgttggagtatgccgactacatggagtaccaagaagagtggcgtcagagtgacgcctatcaggacgcgatgcgttactggcaaaataccctggcggggacgttgccgattcttgatatccccaccgatcaaccgcgtcagaaggtggcacgttaccaaggcgcgtttgttgccttcgcattgtctgccaacacatgcgagcgagtgttggcggcggcgcgtgcgcagcgcgtgtcgttgtataactatctgctgaccgccttcgtcctcctgctgcatcgtaatgcgcgtcaacaggaatacatcgtcggtatgccgattgctgcgcggctgacgaaagaacaggagcatatgatcgcgccgctggtcaacgtactaccgctgcgcttacctcttgacgaagcggcatcgttttccgagttagtacagacgatcagaggtattctgtttgccgctttcaggcaccagcgtctcgaatttaccgacatagtgcgcgcagtgaatgtggatcgcagcgccggacatttcccaatatatcagtgcatgttccaactcgacaatatgcctctggcgagcccgacactaaacggtgtcaacgttacaccattattgttggataccagtgcatctcaggtggatatttcgctaagtatgcagcatatcgatgggcgcatcaccggcactttcgaatacgacgctgggttatacagtgcggatcgtattcagcacctggtggcgcagtggagagaactgctagatgaggccagcagccaacccacgcagttagtccgcgatttgattcgtttcacccctcgagagcacgcttggctggcgcggcacaacgccactgaagttgctctgccgcccgtagataacctgctggcgctagtgttaccgcactgccagcagcgccctacacaggtggctttgcgccacgctgacgacgccatgacctatggcgaattgcaacaggccacgatgcagatgtgtacttggctgcgtgcgcaaggcgtaaaacgcggagaatctgtcgcactgcaactgcctttttgtttcgaattgattatcgcacaattggcgatcctctctttgggggcgagctatgtgccgctggatggtaacgcgccagcggcccgcaatgccctgatcttggcgcaggcaacgccgtgcatgctgctggtggcgcaaccgctggaatcccctcatgggctgacgataccttgggtgctagtgcctgactggcgtagcctgctgacagaaataccgaacctgccagttagtgttgcgccagatgctttagattgcgatgcggtggtgatctttacctccggtactaccgggcagcccaaaggcgtccgactcagccaacgtaatctggtcaacttaaccgcatcctttatatccagctatcaagtgacgcatcaggatgttctgctacccattacctcagtcgcgtctgctagctttgtcggggaggtactgccgctgctcgccgctggcggtaccttagtattggcgcaaaaagcgcagagtttggatagtgatgcgctcattgcgctgctggcatctcagcgggtgactatcctgagcaccaccccatcgctttctgccagcctctctgtgctggctcagtcgatgggatcgctgcgcttgtttctgtgcggtggtgaagcgttagagtatgagcagatagcgccgcttctgccgcacatggcagtggttaacggttatggcctgaccgaaagcggtatctgctcgacctactttcctgtcgcaaagcgtagggagcaagaaacgggagcattgcccattggccgcccgattcagaacacccaagcttatgtggtggatgcatataatcgtttggtaccgccaggtgcctgtggagaactctgtttctctggtctgggcatttcgcccggctaccttgatgcacgacaggatcccgagcgctttgtcgagttgccggaataccctggcgttcgggtgctgaaaactggcgatcgtgctcgttgggcaaccgacgggatgttgttctatctcggcagacaagatcgccaagtgcagatccgtggataccgagttgaactgggcgacatcgaaagcctactgaaacagcatccggatattgctgatgcgtgggtcgatgtgcgacgcaatgcggcggcaacgccgctactagtggccttctattgcagcgtcaacggcgttgcgctggatgctcagcaattgcgcgtatggctcagcctgcggcttccgttgcatatgctgccgttgctctacgtgccgctgagcgccatgccgctaggtgtaaacggcaaaatcgatccccagtgcctgccgctggtcgatctgcggcagttggaagggccgggcgagtatgtccctccggcaaccgaactggaacagcgtctggcggagatctggcagcagttgcttggcctggagcgtgtcggcaccaccacaaatttcttcgatctcggtggacactcacttctgctagtacagatgcagcaatacatcgggcagcagtgcggtcagcacgtggcgttggttgacctgctgcgcttcactaccatcaaacgcttggcggaatttctgctggccccggacgcagcgcaagggaccacaggagatcagacacaactgcgtgcggcgaagcagcgtttggcctttggtcacacgcgctgggcagccacaaccgacagtcatcac

SEQ ID NO: 947 - protein, 1591 aa, Escherichia coli
MRQLPTDDQTIVDYLYRIAGEYGEKAAVLMGDAALSYDLNARSNQLAHYLRGLGIGEDRVVAIRLPRGMAMLIAIFAIVKAGGAYLPLAYNAPRSRIENILSNSGAVCLIGTDDGDRWPIPRVEIDSAAVSAMPTTDLRYRPHARQLAYIIYTSGSTGVPKGVATEHAALLNRIVWMQNAYPISSQDVLFQKTVYTFDVSVWEMFWWAMYGASVVLLPSGLESDPRTLARLIQRHRVSVVHFVPSMLNLFVEYLEMKQDPRLTASLRLVFSSGEKLTVHSVARFYQSVAQGDLINLYGPTEAAIDVSHHRCLRGYDYDDIPIGQAIDGCRLYVLDDHGNPVADGEEGELYLAGIGLARGYLNNVALTDRCFTIHPTLRHLGKPERLYKTGDLVWRDGESQQIHYIGRNDFQIKIRGLRVELGEIEAHAMRFPGVQQAVVVADQDDPDNQLIYAFVVSSVPLNLAALMDALSKNLPAYMLPNRLLAMSELPLSDNGKCCRKTLLDLARAYSASRVDLRETPAVRYLPLSSAQSSMWFMQQLAPHTALYNNPTALLLEGELDRTRMDGAIRQLMSRHTLLRAMAETHNGQPVLAVPQCVSSQALLTIVPLPSVSDDNALQAMINQRAAHPMPLTSGTPLCRFELLTLDDDRSVLLIHLHHIISDGWSKGVLLRELQAAYNGESLTPEPLLEYADYMEYQEEWRQSDAYQDAMRYWQNTLAGTLPILDIPTDQPRQKVARYQGAFVAFALSANTCERVLAAARAQRVSLYNYLLTAFVLLLHRNARQQEYIVGMPIAARLTKEQEHMIAPLVNVLPLRLPLDEAASFSELVQTIRGILFAAFRHQRLEFTDIVRAVNVDRSAGHFPIYQCMFQLDNMPLASPTLNGVNVTPLLLDTSASQVDISLSMQHIDGRITGTFEYDAGLYSADRIQHLVAQWRELLDEASSQPTQLVRDLIRFTPREHAWLARHNATEVALPPVDNLLALVLPHCQQRPTQVALRHADDAMTYGELQQATMQMCTWLRAQGVKRGESVALQLPFCFELIIAQLAILSLGASYVPLDGNAPAARNALILAQATPCMLLVAQPLESPHGLTIPWVLVPDWRSLLTEIPNLPVSVAPDALDCDAVVIFTSGTTGQPKGVRLSQRNLVNLTASFISSYQVTHQDVLLPITSVASASFVGEVLPLLAAGGTLVLAQKAQSLDSDALIALLASQRVTILSTTPSLSASLSVLAQSMGSLRLFLCGGEALEYEQIAPLLPHMAVVNGYGLTESGICSTYFPVAKRREQETGALPIGRPIQNTQAYVVDAYNRLVPPGACGELCFSGLGISPGYLDARQDPERFVELPEYPGVRVLKTGDRARWATDGMLFYLGRQDRQVQIRGYRVELGDIESLLKQHPDIADAWVDVRRNAAATPLLVAFYCSVNGVALDAQQLRVWLSLRLPLHMLPLLYVPLSAMPLGVNGKIDPQCLPLVDLRQLEGPGEYVPPATELEQRLAEIWQQLLGLERVGTTTNFFDLGGHSLLLVQMQQYIGQQCGQHVALVDLLRFTTIKRLAEFLLAPDAAQGTTGDQTQLRAAKQRLAFGHTRWAATTDSHH

SEQ ID NO: 948 - DNA, 1107 bp, Escherichia coli
atgacgaaggatgtcgcactgatgttccctggctccggttcgcaatatgtaggcatggcacggtggctgtatgagcgttatccgcaggtgcgtactctgtttgatgaagctagccagatcacggaacgggacatggcagcgctgtgcctgtcgggtactttggtacaacttgctgagccgacggcaatggcgctggctatctataccaccagcgtggcccactttgtcgcgtggcagcagtttttggcgcaaaccggtgtccatgtcaacctacgttatatgttgggtcatagtttgggcgaatatgctgcgctgacctgtagtggtgcgctgagcttttcccaagcactggcgctggtggcgatgcgtagccgtttagccagtgagatcgcccgcgaaatggacgcgagtaccactatcatcaagcaagggaatcaggcactggtggcagcggcgtgcgaggtggcggagcgtgaaacccgacagcaggtcggtattgcctgcttcaattcgccgcaacagtttatgttatccggacaaaactcggccattatcgccgccgagcaatacctgctggatcatgatcgccaagtcgaagtagtgccgctgattggtggtgttccttaccacagcccactattgaaaccttgcggacagcaattgcgcaaggcgctggatcgctgcgaatggcgacgtccgtgctgcccagtgatctccaatgtcaacgctcaaccctatcccgatacggtcacgccagtccagtggctagaacaacagctctctcagccagtgcagtggcagcgctctctcacctacctgacaggacacttgtcaccgatcgcgatagagatcggtccgcaaagtgtgctgaaaaacctgctgctggagaatcgctatccagcaccagtttacgcatttgacaatcgtcatgatcgtgcgcaactagcattggtgctgggggataacatggcggtgaagaccgatccggaagccgtgcgccgccaacgcatcacgctgctcactaacgccctgacagccacacgccatcaccgcgccgccgatgtggctgccaggtgcgcaattgaaagaattgctcagtcgtttttt

SEQ ID NO: 949 - protein, 369 aa, Escherichia coli
MTKDVALMFPGSGSQYVGMARWLYERYPQVRTLFDEASQITERDMAALCLSGTLVQLAEPTAMALAIYTTSVAHFVAWQQFLAQTGVHVNLRYMLGHSLGEYAALTCSGALSFSQALALVAMRSRLASEIAREMDASTTIIKQGNQALVAAACEVAERETRQQVGIACFNSPQQFMLSGQNSAIIAAEQYLLDHDRQVEVVPLIGGVPYHSPLLKPCGQQLRKALDRCEWRRPCCPVISNVNAQPYPDTVTPVQWLEQQLSQPVQWQRSLTYLTGHLSPIAIEIGPQSVLKNLLLENRYPAPVYAFDNRHDRAQLALVLGDNMAVKTDPEAVRRQRITLLTNALTATRHHRAADVAARCAIERIAQSFF

SEQ ID NO: 950 - DNA, 1119 bp, Escherichia coli
atgtgcactgaaaattatgagctggctcagcaagaggcagtcctgtttgccaaacaacatctcgccctggctgcacagaatattgaacgtcagcagtttattgtgccagacattatttcttgcgtggcgcaggccgggtacttaggtgcgtcaatcccccaaaaatatggcggacgaggttacgattcttatcaactgtgcgctttgcatgaagtgatggctggggttcacggttcgttagaaaatctcataacagtgactggcatggtcagcacgctgctgcaacgcgtgggcagcgcagcgcaaaaagcccattatttgccaaagctggcaacgggggaattgatcggcgcgattgccctcacagagccgaatatcggcagtgacttagtgaacgtggaaacagaattacagcaggatggcgacggttggcggctgaacgggaaaaagaaatggatcacgctagggcagattgctgatttttttattttaatccactgtggtaatcaattagcgacagtgcttatcgatcgcaataccgacggctttactatcactccactcaacgacatgttggggttacgcggcaatatgttggcagagctgcattttaatgactgccgcctgaaggaggatgcattgctcggtccgctcacccctggggtaccgctggcggtgaattttgcgctcaatgaagggcggttcaccaccgcttgtggcagcctaggattatgtcaggccgctgtggatgtggcacgctacatccgccagcgtaaacagttcaagcggcggttattttctcatggcattgttcagcacttgtttgccacaatgctgacccaaacgagtgcgcaactaatgtgcttcagcgcggcggaataccgcgaaacgctgcacccggccatgataaaccaaatcctgatggcgaagtatgtcgcttccaaagctgcggtggacgtggccgggaaggcggtgcaactgctcggtgcgaatggttgccatgccgattatgccgtcgaacgttactaccgcgacgccaaaatcatggaaatcatcgaagggacatcgcaaattcatgaaatccaaattgcgatgaattacatgatggggagtgaagca

SEQ ID NO: 951 - protein, 376 aa, Escherichia coli
  MISC_FEATURE (164)..(164): unknown
  MISC_FEATURE (254)..(254): unknown
  MISC_FEATURE (285)..(285): unknown
MCTENYELAQQEAVLFAKQHLALAAQNIERQQFIVPDIISCVAQAGYLGASIPQKYGGRGYDSYQLCALHEVMAGVHGSLENLITVTGMVSTLLQRVGSAAQKAHYLPKLATGELIGAIALTEPNIGSDLVNVETELQQDGDGWRLNGKKKWITLGQIADFFIXLIHCGNQLATVLIDRNTDGFTITPLNDMLGLRGNMLAELHFNDCRLKEDALLGPLTPGVPLAVNFALNEGRFTTACGSLGLCQAAVDVAXRYIRQRKQFKRRLFSHGIVQHLFATMLTQTXSAQLMCFSAAEYRETLHPAMINQILMAKYVASKAAVDVAGKAVQLLGANGCHADYAVERYYRDAKIMEIIEGTSQIHEIQIAMNYMMGSEA

SEQ ID NO: 952 - DNA, 252 bp, Escherichia coli
atgaatatgaaaaagcaagatatgaaagccgccattcgggaatttctttcacgctcattacgtgggcatacgttgaacgatgatgacgatattttttctctcgggcttgtccattcgttatttactgtgcaaatcatactgtttatagaaaaaaattttcaggttgagctggaagtgagtgagttgaaaacagaacagattgctaccgtcaataaaatagtggagctcattcagcgacaaacaggcctggag

SEQ ID NO: 953 - protein, 84 aa, Escherichia coli
MNMKKQDMKAAIREFLSRSLRGHTLNDDDDIFSLGLVHSLFTVQIILFIEKNFQVELEVSELKTEQIATVNKIVELIQRQTGLE

SEQ ID NO: 954 - DNA, 861 bp, Escherichia coli
atgaacgtggcggtaataggtgcaggagtaatgggaactggcgtcgctcataacatggcgcaatacggcatatcaactaacgttgtggatatttctcaatctcagttggataaatgccgacagatgatcgaagcgaacttacgcttatataattttcacccgcagcataaaaaaaagacgcatagcacagcggagataatggaaaatatccgtttcacaactgagttggacgacattgtagaatgtgatttggtgattgagaatattactgaggatatagagaaaaaaaatgcactatacacacggatgaatacgatctgcggcgcgtcgacagtgtttggtgttaatacgtccgccatatctatcactgcgttgtcaaaattaatgcgacatccggagaatgtagtcggcgtccattttatgaacccggtaccgctgatgcacaccgtcgaattaatccgtggtgtacatactgcagagcgtacactgaacatatttcaccacttatttgctcagttgaataaaaccggcatcgtggtcaatgattctccgggctttgtcactaatcggtgcatgatgatttttgttaacgaagccatatttatggtgcaggagcagatcgcccgtgctgaggatatcgatacgttgtttacctgcttcgggcacaagatggggccactacaaactgccgatttgattggcttggatacgattttgcaatcgttgcaggtgctatatgaaagttttaatgatgataagtatcgccccagctttttattaaagaaaatggtcgatgcagggtatttgggcgtgaaatcagggcaggggttttatcgctatcaacagacgtacgccgagcag

SEQ ID NO: 955 - protein, 287 aa, Escherichia coli
MNVAVIGAGVMGTGVAHNMAQYGISTNVVDISQSQLDKCRQMIEANLRLYNFHPQHKKKTHSTAEIMENIRFTTELDDIVECDLVIENITEDIEKKNALYTRMNTICGASTVFGVNTSAISITALSKLMRHPENVVGVHFMNPVPLMHTVELIRGVHTAERTLNIFHHLFAQLNKTGIVVNDSPGFVTNRCMMIFVNEAIFMVQEQIARAEDIDTLFTCFGHKMGPLQTADLIGLDTILQSLQVLYESFNDDKYRPSFLLKKMVDAGYLGVKSGQGFYRYQQTYAEQ

SEQ ID NO: 956 - DNA, 2607 bp, Escherichia coli
atgaagtttatggaatacgcaagcgaaatgaacggcatggaaatcgccattattggtatggcggtccgtttcccgcagtcccggacgttacacgaattctggcataacatcgttcagggtaaagagtgcgtcaccttctttagcgaggaggagttgctggccgaaggcgtcgaacagagtactctggacaacccggcctatgtacgggccaagccctatatcgagggcatatgcgactttgatgctgcatttttcggttacagtcacaaagaggcgcagactctggatccgaaatcccgcgtattacatgaagttgcctaccatgcgctggaagatgcaggctatgcccaacgtaccagcgatctgatcaccggggtattcgtgggggcgtcagaagatgtggattggctacggcgttcgctgtcacagattggcggcgatgcgctgaatcgttttgagtctggcatctatggtcataaggatctgctcgcacatctcattgcctacagtctcaatctcaacggtccggtgtatagtctctacaccagttgttcgacttctctgagtgcaacgcatatcgcttgccgcagcttgttgtttggcgaatgtgatctggcgttggcgggtggaattactatcgatttaccgcagaagtcaggctacttctgtcaacagggcatgatccactccaccgatggccactgccgtccttttgacagtcaggcttctggcaccctgtttggcgatggcgcgggtgtggttgtgcttcggcgtttggaagatgctctggcagcgggcgatcgcatctatgcggtgatccggggtagcgcggtcaacaatgacggtaaacaaaaaatcggttttgtcgcgcctggtcatgagggacagaaggcggtcatttgtgcggcctgtcatctggcagaagtaagcccagaaagcatcggctacgttgaaacccacggtaccggcacccgtattggcgatcctatcgagttcgctgcgttgacggaggcgttcgatacttcacaccgccaatactgtgcactaggggctgtaaaggcgaatattggccacacccacgcggcggcgggcgtggctgggttaatcaagacggcgctggtacttcatcaccggaccattccgccgctcgccaactatcaaatgcctaactcgaagctggatctggcgcattcaccgttttatatcccgatacagccgcaggagtggcccgcatcgcggatgccgccccgcgctggcgtcagttcttttggcattggcggtactaatgtgcatatgattttggaagggctgaatcctgcggtgcgcgatgaccatgaccaagtgcgagcaccggtgtttatccctctctccgcgccgtctttcgagcagttggatgagctgacgcaacagcttaccccgttgctggctacccttgatgcgtcaacgctagcctacacacaacaagtggcgcgccccgtgtttgattgccgccgagtgatacaagtggaaaacgatggtacgcaagcgatgctggcatcgctggataacctaatgcccgacgctccttggggcctacactgtccagatctacgtactacgaacgattgtacttacgcacagtggctggcgcattcggcacattatcaacgcgaagcgactgctctgacggcattactcgacggcatgaatattccacccgcttattgccacgctgaaacgtgggcggcacaagcgaacagcagcctgctaatcagaggctgccagactatcgccgcgctaaaaacctggatgaacctgctaccgacattaacactgctgtcgggtgctggaacaggccttttgcctgccgctgcagccagtggcatgattgcgacgcaagacgtgttgcatttgctgtgggaaatggagcaaaaggcgcttcatctctggcttcctgagcgccatgaacctatccccggctacgtgctggcttggcaaggaaatcccatcaccgatgcacagcgtaacgacagagggttttggagtgaagcgctgttggcagatacccgagaactgggggagggcgttcacagtatcaactgggttaggctgccgccggaaataagagaagacgttgatgtattgcgctacgtggcgcaactgtggtgtgcaggtatcaatgtggattgggccgtgtggtacggcactccgctgccgcaacgcgggagcgcatcagcatatcccttcgcacacaaccactacccattgcctggacgggtaatgggtagtgtggagacccaacccgaagcaggacccgaaacgcaccacccttatcaggcacgtcccgtgttaagcgtacctttcgtagccgcacactcgcggggtatgcagtatatcacaggtctgatggaactgttgctggaaatatcgccggtcggggtggacgacgacttttttgaattaggcgggcattcgctgctggtgacgcaattgacctcccgtttagaacgcgatttcaacgtacatatcgatcttttgaccctgatggaaaaccccaatccgcgcaatatctacgcgcatatcgcggcgcaactggggggcgaagacaacctcgaaatagcctgtcag

SEQ ID NO: 957 - protein, 869 aa, Escherichia coli
MKFMEYASEMNGMEIAIIGMAVRFPQSRTLHEFWHNIVQGKECVTFFSEEELLAEGVEQSTLDNPAYVRAKPYIEGICDFDAAFFGYSHKEAQTLDPKSRVLHEVAYHALEDAGYAQRTSDLITGVFVGASEDVDWLRRSLSQIGGDALNRFESGIYGHKDLLAHLIAYSLNLNGPVYSLYTSCSTSLSATHIACRSLLFGECDLALAGGITIDLPQKSGYFCQQGMIHSTDGHCRPFDSQASGTLFGDGAGVVVLRRLEDALAAGDRIYAVIRGSAVNNDGKQKIGFVAPGHEGQKAVICAACHLAEVSPESIGYVETHGTGTRIGDPIEFAALTEAFDTSHRQYCALGAVKANIGHTHAAAGVAGLIKTALVLHHRTIPPLANYQMPNSKLDLAHSPFYIPIQPQEWPASRMPPRAGVSSFGIGGTNVHMILEGLNPAVRDDHDQVRAPVFIPLSAPSFEQLDELTQQLTPLLATLDASTLAYTQQVARPVFDCRRVIQVENDGTQAMLASLDNLMPDAPWGLHCPDLRTTNDCTYAQWLAHSAHYQREATALTALLDGMNIPPAYCHAETWAAQANSSLLIRGCQTIAALKTWMNLLPTLTLLSGAGTGLLPAAAASGMIATQDVLHLLWEMEQKALHLWLPERHEPIPGYVLAWQGNPITDAQRNDRGFWSEALLADTRELGEGVHSINWVRLPPEIREDVDVLRYVAQLWCAGINVDWAVWYGTPLPQRGSASAYPFAHNHYPLPGRVMGSVETQPEAGPETHHPYQARPVLSVPFVAAHSRGMQYITGLMELLLEISPVGVDDDFFELGGHSLLVTQLTSRLERDFNVHIDLLTLMENPNPRNIYAHIAAQLGGEDNLEIACQ

SEQ ID NO: 958 - DNA, 3894 bp, Escherichia coli
atgttgcatcgtacgctggcggcgctgtgggtcaggggggagaatattgattggagacgctttaaccagacggcacttcggcaagcacattccattgccggattaccccttcgaacagacttattactatcgctatggtgcgtgcacatttccggttatcgccagtatccaaatcctctgcgccgtccgcaagatgagtggctccagcgtgtgctgtggcggatgcacgacacatccttgcgggaggcgttctatgcgccgggcgaattgatcatcattattagtgctgacggcgacaagttacagcagacgctgatgagtagtggtgtcgacagcatcacaatgccgctgccgatatcgtcagaggacgacgtgtgggataatgaccgtattctgacgcatttccacgacatctgcgcacttttagcacacaaaacctaccgacagttacattgcttgtatgctcccggtgcggaggcaggatcatcgttgacacagtcgctctcgggactttatcgtgttgctcgctggtgtatgcacagcaccacgccgctggcgtccttaacagtattgacccatggtgcgtttcgcgtacaggaagaggataatcccgaaccgacgctggcagcgttgtcgggcgcagtaaacgtgtttgcccaagagctgcacccgaccgaagtacgattgatcgatatcgatgcgcagagcagtgatgagaatctgaacttgctaacccagcgtctggccccgaaacaagaaacggtaatggcgctcaggcaggggatgctttacctgcgacgctttatcccgacacggctgttggcgcacttaccccctcaaacagggtgtataccgggcaacgtactgtggattatcggcggtgaaaaggggattggccgcatgatcggcgaagcgcttgctcagcgtgagggagtccgtgtggtactgagcagccgcacaggttatcaccatgaagcggtgcagcaggacgcattagacgttatccactgcgacgtgacgcaggcggaggcggttagagcttgtctggcaactctgctcgaacgctatggacggttggatggcgtgatttttgctgccgacgctaccaccacattgacactgcatcaattgagcgaatctgcgctacgcgacacgctaacggtgaaagaacggggtactgctaatgtgctgcatgcgttagcgcaacggaatctgctggatgagcgtctgctactgctgttctgtaactcgttggctgccgtgaatgcggagatcggccagacaggctatgctaccgccagcgcctatttggatgcactggcacagcaactgcgtacccgctacaaggtgaatgcgctcagtatcgggttggatgcattgcgtgagcagggcatgttgttggatgctataaacggcagtgaatacgatgtcttgcgtggactgcgcccattgatgacgggaacgttgctacaggcttataaacaacaaggggctgacaccagctactacgcgcgattatcccccgagtccgattggctgctggatgagcaccggatatccggtatcgccacgctgccgggaaccggctatctggcgctggcgtatgaagctctgcgccattactttgtgcaagaccaaatctgcattgatgaattggtctttttggcaccgttgactgtgatggacaactgcagtgttgacgtttttgttgacatttcacctaacgggcaaggagttagtgtcgaggtgaaatcaatgacggagcgctttagtggcacgttaacaacccatgccagaggcagggcgacgcgtctgatggtagacgataatgttgtgtgcgatctcacggggctgatgcgcgagatgcacactatcactcctccaacaaaggaattatcgagcacgcacttccactatgggccgcgctggcacagcgtacaacaactgtatggcaataccgcccagactcaggttttcgcaacgctggccctgcccaccgttgccatgatacgagcactgcaccctgcgctgttggacatcgccagcagtgttgtcgaacaactgcctggttttcatactgattcggtacctttcctttatcaggatttacgcctgtaccgcccgttgccgaacaccttacatgtggcgctgactgtcaatcggcacgatgaggagggtgacagctacgctttcacgctctacgacatggcaggcgagatggttgcccgctgtgcggcaatggtgaagcgcaaggtacagctccacatacaagatgtcgatgacgacacgcgactgcgcgtgcccagtgccgataactaccaactgcggctggccgctgagggggagggggcaggaaagctagcgttgtgccctacgccgcgcttagcgctgggggattcacaagtagagattgaggtactggccaccggactgaactttaaggatgtgctgttcaccacgggattgctccggcagcagccgggtgagccgctgcaattgggactggagtgcgccggacgcattactcgcgtgggtaaaaatgtcactgaatttgccccgggagaggatgttatggcggtgctaaacggtggttttgtccagtacgcacgggtagaaagcgattgcgtagtagaaaaccagcccattgtcgcatcgaacagggggtgcgctgcctatcgcatacctcaccgcctattacgcactggtggtgcggctaatttgcaacccggagaacgagtattgatccacagtgcggcggggggcgttggcttggctgcgctacatattgccaaacgctgcggagcacagattttcgccacagcaggtagcgagcagaaacgcgattacttgctttcgctaggcgtacatgccgtagctgattcacacgacgaacagttcgctgccactctgctgaccgcatcggacggacaggggatggatgtgatccttaactccctcacaggccgtctgcttgacgctagcctcgcgctgctggcaccgctgggccgttttcttgagctgggcagcaaggacattgtggaagacaaagcgctaccgatgcgtttcttcgcccaaggcggcacctttattccgattaattttcacgcggcacatggtgcgtttagtcgctacctgcaacagattgtcgcttggatagatgataacacgctaccgctccttccatgcaaatccgtaccattgcccgaggttgcacgcgccttcgccaccctgaccacgccgcagcatattggcaaggtggtggtaacgcatcgcactgcggcaggcatggaccggctgaacgccatgatagcagaaaggcgcctcggcggctatgcgctcagcatgagcaatgccgaggtgatgcgccaattgtggccgatactgaacactcgcagtccgtgggcgcaactgctgctctcacctcgggcgatcgatagattagcgcggggcaaccgggtggatcgcggtgtaccgtctgccgctaacgatacgattactcagcagacagtgaaaaagcggccccgtccggaaattggcgtgccttacagccccgcgacacgtgaagtggaacgcgtgctctgccaaatcctggaagagtatctgggtctggatagagtaggcattgacgacaactatgccgaattaggggcaacctcactcgatatggtgcaactgagtgggcaaatggcgcgtcactatccgcaagtgagcgtggtgtcgctgtacaaccacgccaccgtgcgccagctggcgacgttttgccagcccccggagggcgagtcaaatgcgccatcaccacagcctgcagtacagacgaatacgcgcgcgaatcagatagcaaaacgtgctttgcaaattgcgaaaaatactgcgcgcagtcacacgtctttgcat

SEQ ID NO: 959 - protein, 1298 aa, Escherichia coli
MLHRTLAALWVRGENIDWRRFNQTALRQAHSIAGLPLRTDLLLSLWCVHISGYRQYPNPLRRPQDEWLQRVLWRMHDTSLREAFYAPGELIIIISADGDKLQQTLMSSGVDSITMPLPISSEDDVWDNDRILTHFHDICALLAHKTYRQLHCLYAPGAEAGSSLTQSLSGLYRVARWCMHSTTPLASLTVLTHGAFRVQEEDNPEPTLAALSGAVNVFAQELHPTEVRLIDIDAQSSDENLNLLTQRLAPKQETVMALRQGMLYLRRFIPTRLLAHLPPQTGCIPGNVLWIIGGEKGIGRMIGEALAQREGVRVVLSSRTGYHHEAVQQDALDVIHCDVTQAEAVRACLATLLERYGRLDGVIFAADATTTLTLHQLSESALRDTLTVKERGTANVLHALAQRNLLDERLLLLFCNSLAAVNAEIGQTGYATASAYLDALAQQLRTRYKVNALSIGLDALREQGMLLDAINGSEYDVLRGLRPLMTGTLLQAYKQQGADTSYYARLSPESDWLLDEHRISGIATLPGTGYLALAYEALRHYFVQDQICIDELVFLAPLTVMDNCSVDVFVDISPNGQGVSVEVKSMTERFSGTLTTHARGRATRLMVDDNVVCDLTGLMREMHTITPPTKELSSTHFHYGPRWHSVQQLYGNTAQTQVFATLALPTVAMIRALHPALLDIASSVVEQLPGFHTDSVPFLYQDLRLYRPLPNTLHVALTVNRHDEEGDSYAFTLYDMAGEMVARCAAMVKRKVQLHIQDVDDDTRLRVPSADNYQLRLAAEGEGAGKLALCPTPRLALGDSQVEIEVLATGLNFKDVLFTTGLLRQQPGEPLQLGLECAGRITRVGKNVTEFAPGEDVMAVLNGGFVQYARVESDCVVENQPIVASNRGCAAYRIPHRLLRTGGAANLQPGERVLIHSAAGGVGLAALHIAKRCGAQIFATAGSEQKRDYLLSLGVHAVADSHDEQFAATLLTASDGQGMDVILNSLTGRLLDASLALLAPLGRFLELGSKDIVEDKALPMRFFAQGGTFIPINFHAAHGAFSRYLQQIVAWIDDNTLPLLPCKSVPLPEVARAFATLTTPQHIGKVVVTHRTAAGMDRLNAMIAERRLGGYALSMSNAEVMRQLWPILNTRSPWAQLLLSPRAIDRLARGNRVDRGVPSAANDTITQQTVKKRPRPEIGVPYSPATREVERVLCQILEEYLGLDRVGIDDNYAELGATSLDMVQLSGQMARHYPQVSVVSLYNHATVRQLATFCQPPEGESNAPSPQPAVQTNTRANQIAKRALQIAKNTARSHTSLH

SEQ ID NO: 960 - DNA, 5622 bp, Escherichia coli
atggttatggataatacctctggagattttccatgtaataagatggacacgcgtaagcagttaccgctaacaccaagtcaacaggggtttttattccattccttaaaggataagaaaaggagtaactaccatgagcattttacatgcattttttctcagcatgtagatagcgcccacttcaagtgggcgctggaaacgttatttcgaaagcatgagtgttttcgcactgattataactgggagattgatgagcgcccttgtcaggtggtgaagaccgatgtgttgccggatatatatgtgttagactgtgagcaagaggaaatacgttttctactagctaatgatgacattatcattcctgtcccgcaggatgacggtattgatgctataattcctcaactgctacaggctgatttaaaatacccattttccttgaaaacgatcccagtccgggcctaccttattcagtcaacgaaagaaagtgcttttatactatcataccatcatattgtgatggatggctggagcttatcccttttcattaaacagttgctccaactctatggagcggctgtggtcagtggtgtgagggatgatagcgccattatcccctcatctctgaaaccccttgtagacacactgtcggcccgacgtcacacctttcagcacgactattgggctgcatatcttcgggagggaacaccaacttgtatcgtgccgctgtcacaatatcacacagatactgaagccgagaacaattcttacgttaatcaaacaaatcatgtggagatcaatttgtctccggatgtgtgtcagaaaatacagacgctatgcagcgattatcgtatcacccccgcagtaatcttctatgtggcctggggcatcctgctacaacgttggtgctatgctgacgatgtgttattcggcgcgacaatatcagggcgaaatataccaattgatggtatagaagaaacactagggctatttattaacacgttgccgctgcgtctgcgtgatgatggggcgacactgttgcaacacttacaacgtatgcaccaaacactaatagctcactacagcaatgaacatgatgccttagccagcatacaacggttggtacataaagaaggtcatgctggggatctttttaataccttagtggtgttggagaattatcccgttgatatgacattattgtcatgcgcgtcgcccgtggcaattcgccatctcagtgtacatgaacaaacgcactatccgctgaccttgaccatcactcaacagaagggattccgtttcagtattgcatatgcccttaactacctgaccaacaacatggcgcaagcgttgctgatgcacctgagttatctgcttgaacaactggtggacaatccgcagcgccccattgctgcgttggtaaacttgtccccatgccagcaggcgcaggtacttcaaccctatctggaacgcatggcatgccgggattgggatagtcaatccaacgtcatcgaacaatttcatcaagttgctgcgacttcgccagcacaggtcgcagtggttgatgaattgtgcgcgttgacctattcggagttggcagcacaagctgagcagctcgcggcttatttggtacagcagggtgttatggttggcgatactgtaggcataattagcgaacgccgggtaaacaccgtggttgccatcatcgccatcatgttgatcggggctgcttatgtgcccatcagccccgactacccagtgggtaggatgcaggaaattattgatgacagcggcttggcgctgttgctggtacatggcaaaccgctagatgcattaaacgttgcgcagagtgacctctgtgcatttcccgtcgcgccctcggtggtatttccggttatcacaccagattctcgcgcttatgtgatttattcatcggggtcgacgggtaagccaaaaggtatcgcggtggcgcaccgcggtttattgcgcctgatacaaggcgacagcccgctgaaggtggagagcggtgagacaacgctgctgacctgcccatttgagtttgatgtttcggtgtttgagatgtggtctaccttgctcaaccacggcaaactagtattactcagcaaacaggcattacttgatatcaatcacattcgccgcacgatcgctgatgaacaggtggcgcgcgcctggtttacctcatccttgtttaactcctatgtggcagaaggtgccgatttcttcggtatgttacaacacattacggtgggcggcgaagcagtatctgcgtggcatgtcaacgacgtgatgcaaaaatacccgcatctggtggtgacaaacggttatgggccgacggaaaacactatttttaccaccgcatatcgtttcaacgggttgcaacccgcccgagtcccgataggatacgcggtaccgggcacctcgctctacattaccgatctccatgggcatttgttgcctatcggtgccaccggtgaactagtggcgggtggagtgggggtcgccatcggctatcagaacaacccggcgctaagtgcgacggtttttgtccctgatccttttattcccggcggtatgatgtacaaaactggcgattatgcccggttgctggatgatggctgtgttgactgttttgggcgtaaagacggtcaaattaagatcaatggacaacgaattgaaaccggagagatcgagcagcgcctgctggagtgctccggcattatcgaggcggtagtggttccttaccgcgtacgtgaaacgctgcatattgcggcagtggtctgcgtcaatgatagctatgatgaggtggaagttcgagggcaattggctgacagattgccgccattcgctattccggaatccttggtggtggtgacggagattgcaaaaagccatagtggcaaggccgacttggcgcagttgcggtatctcctgcccgcaactcagtgcaacgccgtgtccaccacgatatcagaggtgcatagtgacatggaacatgcgctgcatgctatctggcaacgcgtacttgatagacaagacattgatagcaatgcctcctttttcgccctcggtggcacctcattggataccatcagggttaaaggggatattaagcggcaacttggcttggagattgatattaccgatctctttaagtacccaacgctcacggcgttagcacattttctcgatactgccgtatcgccggaggatgcaattccaacgcgtgctgttgtctacagcgacatgccggtggcgattgtcggtatggcgggacgtttccccggtgcggcgaatattgcagcgttgtggacgctggttgtaggaggggaatcgggattaacactgttcagtgatgaagagttgcgcgcgcatggtgtgacacctgacacgcttaaacaagcgaattatataaaaaccaaagggattgttgatgatcacgaatggtttgatgcggatttctttggttatactcccaacgaggcggaatgtatggatccgcaaattcgcttattgcatcagtgctgctggcaaactctggaacacgctgggtgcgatcctgccacctttactggtgcgattggcatttatgccggactgctgacatccccccactggcttaatgcggtaatgcaagacactaccgactctaccgccctgtacaaggccagtatcctgaatatccattccgtcacagcattgattgcccatgcgcttaacctcaccggccctgccgtgacgcttgacaccgcctgctccacttcggcagtggctatccaccaggcctgcatcgcactacgtaaccgggattgcgatgcggcattggcgggcggcgtttctatcgagatgcctgcgtaccggggctatgaatatcatgaaggcatgatcaatgcgcgagatggtgtctgtcgtcctttcgatagccaagcctctggcacagtcaccggtgatggcttaggaatgctgctgctaaaacgtctggacgacgcgctggcggatcgggactgcatctatggtgtgatcaaaggttcggcggtcaataatgatggcaataacaaaatcggctataccgcgccgagtgtgatcgggcaatcaacggtaatccgcaccagtttgcgccgtgccggttttgatagcgacagtatcggattggtggaagcgcacggcaccggtacggtgctgggtgatcctattgagttacgtgcgcttaatgaggtgtttggcccaacacctgttccgttttgtgtggtttcagcgctgaaaagtaatattggccacctcaactccgctgcgggagtggcgggcgtcatcaaaacaacgctcgccctgcatcatcaagtgttgccaccaacagcgcactttcgccaactcaatcctgctatagatctatcgcgttctgcattgtacgttaaccagcaagtccaaccgtggccgtcgacgcgtcctcgtcgtgcactggtgagctccttcggcatcggcggcaccaatgccagcatcgcactagaagcacatcaacatgaggacgacccttcagcgacgggggtacgcgacagctatctgttgttgttctccgctaaaacacccgctgcgttagagttgcgcgtggcctccacactggaatatgtcaagcatggagtaggggtgcgcctgccggatgtggcttatacattgcaaactggacgcacagcctttgaccatcggcgggcttatttggtgagtcgtgggtcgaaaatcgatctctcctgtgccacgatattgcaagcggaaatcttcaatggtcagcgcacgacagcggagatctgcttcatgtttcctggtcaaggtagccaatatcacggcatggccagcgcgctctatgctcatcaacccatgtttcgccagcacatggatcgctgctttgctgcattccaacgctattcgacggtcgatctcaaggcgttgttgtttgacgatgaggatacgcgggatattgatcaaacgcagttcacacaaccggcgttgttctgtgtcgaatacagcctagcgcgcaccttgattgatctggggattacgccggacagtatgatcgggcacagtctgggcgagtatgttgcggcctgtattgctggcgtatttactcttgaggatgcgctgcacgtcattgaggcgcgcggacgtttgatgcagtccatgcgtcccggtagcatgatggcggtctaccttagtcgcgaacagttgaccccatggctagctgcagaacggggtattgaactggcagctaataatagcgcgcatttttgcgtagtcgcgggcgagcaggcggccatttcccgtttgagcacacgcttagtcgagggcgggatacagcacaggcgcctgaaaacctctcacgcattccactcggccatgatgacgccgatgctgcacgattttgcacagttgctggggcaaatcccgatgcacgcgccgcacaagcgctttatatctaatgtaagcggtacatggattactgaggagcaagctacctcgccggattactgggtgcagcaagtgcgcaacgcggtgctgtttagcgaaggtgcggcgcaactgttggtacaacccacgctgtttatcgaatgtgggcccggg

SEQ ID NO: 961 - protein, 1874 aa, Escherichia coli
MVMDNTSGDFPCNKMDTRKQLPLTPSQQGFLFHSLKDKKRSNYHEHFTCIFSQHVDSAHFKWALETLFRKHECFRTDYNWEIDERPCQVVKTDVLPDIYVLDCEQEEIRFLLANDDIIIPVPQDDGIDAIIPQLLQADLKYPFSLKTIPVRAYLIQSTKESAFILSYHHIVMDGWSLSLFIKQLLQLYGAAVVSGVRDDSAIIPSSLKPLVDTLSARRHTFQHDYWAAYLREGTPTCIVPLSQYHTDTEAENNSYVNQTNHVEINLSPDVCQKIQTLCSDYRITPAVIFYVAWGILLQRWCYADDVLFGATISGRNIPIDGIEETLGLFINTLPLRLRDDGATLLQHLQRMHQTLIAHYSNEHDALASIQRLVHKEGHAGDLFNTLVVLENYPVDMTLLSCASPVAIRHLSVHEQTHYPLTLTITQQKGFRFSIAYALNYLTNNMAQALLMHLSYLLEQLVDNPQRPIAALVNLSPCQQAQVLQPYLERMACRDWDSQSNVIEQFHQVAATSPAQVAVVDELCALTYSELAAQAEQLAAYLVQQGVMVGDTVGIISERRVNTVVAIIAIMLIGAAYVPISPDYPVGRMQEIIDDSGLALLLVHGKPLDALNVAQSDLCAFPVAPSVVFPVITPDSRAYVIYSSGSTGKPKGIAVAHRGLLRLIQGDSPLKVESGETTLLTCPFEFDVSVFEMWSTLLNHGKLVLLSKQALLDINHIRRTIADEQVARAWFTSSLFNSYVAEGADFFGMLQHITVGGEAVSAWHVNDVMQKYPHLVVTNGYGPTENTIFTTAYRFNGLQPARVPIGYAVPGTSLYITDLHGHLLPIGATGELVAGGVGVAIGYQNNPALSATVFVPDPFIPGGMMYKTGDYARLLDDGCVDCFGRKDGQIKINGQRIETGEIEQRLLECSGIIEAVVVPYRVRETLHIAAVVCVNDSYDEVEVRGQLADRLPPFAIPESLVVVTEIAKSHSGKADLAQLRYLLPATQCNAVSTTISEVHSDMEHALHAIWQRVLDRQDIDSNASFFALGGTSLDTIRVKGDIKRQLGLEIDITDLFKYPTLTALAHFLDTAVSPEDAIPTRAVVYSDMPVAIVGMAGRFPGAANIAALWTLVVGGESGLTLFSDEELRAHGVTPDTLKQANYIKTKGIVDDHEWFDADFFGYTPNEAECMDPQIRLLHQCCWQTLEHAGCDPATFTGAIGIYAGLLTSPHWLNAVMQDTTDSTALYKASILNIHSVTALIAHALNLTGPAVTLDTACSTSAVAIHQACIALRNRDCDAALAGGVSIEMPAYRGYEYHEGMINARDGVCRPFDSQASGTVTGDGLGMLLLKRLDDALADRDCIYGVIKGSAVNNDGNNKIGYTAPSVIGQSTVIRTSLRRAGFDSDSIGLVEAHGTGTVLGDPIELRALNEVFGPTPVPFCVVSALKSNIGHLNSAAGVAGVIKTTLALHHQVLPPTAHFRQLNPAIDLSRSALYVNQQVQPWPSTRPRRALVSSFGIGGTNASIALEAHQHEDDPSATGVRDSYLLLFSAKTPAALELRVASTLEYVKHGVGVRLPDVAYTLQTGRTAFDHRRAYLVSRGSKIDLSCATILQAEIFNGQRTTAEICFMFPGQGSQYHGMASALYAHQPMFRQHMDRCFAAFQRYSTVDLKALLFDDEDTRDIDQTQFTQPALFCVEYSLARTLIDLGITPDSMIGHSLGEYVAACIAGVFTLEDALHVIEARGRLMQSMRPGSMMAVYLSREQLTPWLAAERGIELAANNSAHFCVVAGEQAAISRLSTRLVEGGIQHRRLKTSHAFHSAMMTPMLHDFAQLLGQIPMHAPHKRFISNVSGTWITEEQATSPDYWVQQVRNAVLFSEGAAQLLVQPTLFIECGPG

SEQ ID NO: 962 - DNA, 732 bp, Escherichia coli
atgaggattgatatattaattggacatactagtttttttcatcaaaccagtagagataacttccttcactatctcaatgaggaagaaataaaacgctatgatcagtttcattttgtgagtgataaagaactctatattttaagccgtatcctgctcaaaacagcactaaaaagatatcaacctgatgtctcattacaatcatggcaatttagtacgtgcaaatatggcaaaccatttatagtttttcctcagttggcaaaaaagattttttttaacctttcccatactatagatacagtagccgttgctattagttctcactgcgagcttggtgtcgatattgaacaaataagagatttagacaactcttatctgaatatcagtcagcatttttttactccacaggaagctactaacatagtttcacttcctcgttatgaaggtcaattacttttttggaaaatgtggacgctcaaagaagcttacatcaaatatcgaggtaaaggcctatctttaggactggattgtattgaatttcatttaacaaataaaaaactaacttcaaaatatagaggttcacctgtttatttctctcaatggaaaatatgtaactcatttctcgcattagcctctccactcatcacccctaaaataactattgagctatttcctatgcagtcccaactttatcaccacgactatcagctaattcattcgtcaaatgggcagaat

SEQ ID NO: 963 - protein, 244 aa, Escherichia coli
MRIDILIGHTSFFHQTSRDNFLHYLNEEEIKRYDQFHFVSDKELYILSRILLKTALKRYQPDVSLQSWQFSTCKYGKPFIVFPQLAKKIFFNLSHTIDTVAVAISSHCELGVDIEQIRDLDNSYLNISQHFFTPQEATNIVSLPRYEGQLLFWKMWTLKEAYIKYRGKGLSLGLDCIEFHLTNKKLTSKYRGSPVYFSQWKICNSFLALASPLITPKITIELFPMQSQLYHHDYQLIHSSNGQN

SEQ ID NO: 964 - DNA, 264 bp, Escherichia coli
atgcgtaaagcccgttttactgagcatcagatcatcgccgtgattaagtcggttgaagccggacgaactgttaaagatgtctgtcgcgaggccggaatctctgaagccacctattacaactggaagtccaaatacggcggcatggaggcttctgatattaagaaaatcaaggatcttgaggacgagaaccgccgtctaaaacaaatgtttgccgacctgagtctggagaaccgggcgctgaaagacgttatcgaaaaaaagctt

SEQ ID NO: 965 - protein, 88 aa, Escherichia coli
MRKARFTEHQIIAVIKSVEAGRTVKDVCREAGISEATYYNWKSKYGGMEASDIKKIKDLEDENRRLKQMFADLSLENRALKDVIEKKL

SEQ ID NO: 966 - DNA, 507 bp, Escherichia coli
agtctgaacctgagctggtctgtcgattttatgcatgatgccctggtctgtggccgtcgttttcgcatgttcaatgtcgttgatgattttaaccgtgaggcattgtcgattgaaatcgatctgaatctgccagctcagcgagtggtccgtgtactcgacaggatcgcggcaaaccgtggctatccggccatgcttcgtctggataacggcccggaatttatctccctggcactggctgaatgggcagagaaacatgcaataaaactggagtttatccagccgggtaagccgacgcagaacgctttcattgagcgctttaaccggacataccgaacagaaatactcgatttttatctgttcagaacgctgaatgaagtacgggaaatcactgaaaaatggttatcaaaatataactgtgaacgcccgcatgaatcgctgaataatatgacaccggaggaataccgacagcgccattatttggccgggatctcaaaaagtgtatggaac

SEQ ID NO: 967 - protein, 169 aa, Escherichia coli
SLNLSWSVDFMHDALVCGRRFRMFNVVDDFNREALSIEIDLNLPAQRVVRVLDRIAANRGYPAMLRLDNGPEFISLALAEWAEKHAIKLEFIQPGKPTQNAFIERFNRTYRTEILDFYLFRTLNEVREITEKWLSKYNCERPHESLNNMTPEEYRQRHYLAGISKSVWN

SEQ ID NO: 968 - DNA, 175 bp, Escherichia coli
atggacactgctctaagcgaggttctggttttcaaattgttccggagtgagaccgccacaccaactgtgccgtcgccagcgactgtaatcacattcgatataattaaacaccgttgcccgcattatttcccggctgataaagtgttctccatggagacattccactttcagtgaa

SEQ ID NO: 969 - protein, 57 aa, Escherichia coli
MDTALSEVLVFKLFRSETATPTVPSPATVITFDIIKHRCPHYFPADKVFSMETFHFQ

SEQ ID NO: 970 - DNA, 396 bp, Escherichia coli
atgttaatcaacgaggagctggtagataagattgacactaaaaattatggtgatggttccaataacgtgtttgttatctggactttatcattaaaatcctctacaaaatccgagtgttttaaatttctaggcttcgtacatctacaatctgtactcgttgaaatttcttcatctccagagaagtactacaagttacgtatccatcaagaacgtgttatggaaggtatgatgcctgaagaaccaaaagccatagttatagaagatactgagtgggggtgtatccactcgcagtatcactaccaagataaagatcctgcgataataacatgtatcgtaaacgtaaataatactgacttaatagctacagagcttgtgaactcagtgttgaatacatcc

SEQ ID NO: 971 - protein, 132 aa, Escherichia coli
MLINEELVDKIDTKNYGDGSNNVFVIWTLSLKSSTKSECFKFLGFVHLQSVLVEISSSPEKYYKLRIHQERVMEGMMPEEPKAIVIEDTEWGCIHSQYHYQDKDPAIITCIVNVNNTDLIATELVNSVLNTS

SEQ ID NO: 972 - DNA, 4809 bp, Escherichia coli
gacctttcggtccgtaagaggctaatctctatgtgtcgcatagatatggcctcagattaatgttaagcgtcttgcaggacgcgtaatgttaactggggcttttctctatctgccttttggtgttcatgcctgagacagatagcctcaagcacccgcagtcattctacttaactaagatttccccgcaaaccgtttttgtccggcacagtaaatatccaactaaaccaatggcgttcgctgtatttaccgccagtattcaatgcacatgaccgccatgaacacccctaaaaaaagggcatttatatatccaaatattaatatcaaaacatcaactttttccatataccttgctgtgaagatgatgggcatacatgatacgaacaaccagaacgcaacaaacaaaaactgcaatgcgtttttcattattcctcctacaatcaatgtgcaattacatttaaacacacctcaatttggccggatatataaatatctaaaccagaaaaaatcacttacatagcgttacaaactctttagtctaaatattcatcgtaaaacattccccatacttatcagcccgttctgcgccaggtagctcattgccttatctgggaatctgtaatcaggtttccggatgctggtggattttcgcgttttagttgttcataaaagtgcacagctttaaccagttcttctgatgtaaccgggactggcggggcagtgaataaggcctgaatttcatagttcggcctgtcgttacaatcctcttttttcggtacatatttccagtcaccagaccactacttcccctgaaagtccgtaacgccttttttttcacgtagcgatatcgccatgccactgtttttgcttgccccgccgtttcatgcccttcctgataattaacctcgctcattcatcgccccactcatcacaatatgcttcgaccggagttttttctgcttcataatcatcacgccatgcttcagcatcagcagcactgccaccacgtaactctgcatagtccattaacagttcatgccattcttcaaaactgacgttgtatttagttgaaccaaaatcagccattttgttcttcctcttcgtcttttatttcgtgatatgagtaattgcagtagttaaagaaaatatcttttgcttcgtcatgtatttcatcaggcgtcgcatcatcatccacttcgaattcatcctcgaaatctccaccggctattcccgtttcaataattattttaaactttcgcatttaactaccgccctttcgggcggcctcctgatattctgagggtgcagaaatccctccggttaaggattaaatttttaacagagctaaatttaattattcagttctggattttgtcgccctgcgtatccgcgctttcgcgttacgctcaatctgaattagcttttctatattttttcgcctttcccgctcctcctgacgcaagagccttacatcatctgccagtctggtttctcttttcgccacagagagcatccagtcaaatggctccacaactgcaccgcagattttacagcggacctgacgctctttttcgtcaacccggacagaggcgtgatgacaatatggtctttccgatggctcataaagaaaattaacctgattacgagggtcatcctcttttaccggaaataaaacgatattgcttaactcatcctctggttttatttccatgctcctctcctttgatgcgaatgccagcggtaattgaagcctgatagctaatttcactcacagtaccgcctcctgaaaattaccctgatagaaagccagtacacgctgcatagcttcactcttccggcactcgcgacagattatgtttaggcgactgtcgtagcgacgtatttctccgtcaggtgatgaccagataaggtccggatcaaccacagcaggtttcttcacctttgccctcgagagttttttgcgggcgttttgccagtccttacgcgcctgttcagaggggaataacccgtagccggagttgtatacatcgccgctggcaaccagctctcttgcgagaacgctcatcagatatcttgtcgcacctgtcttgacttccagttgccgtaacgtctcacgcccactctggcgtacgagttcaacaacctgccctttaattttttctcgctcttcttgtgtaaaaacttttgccacaagccctcctgaaaattacctcatgaccagaaatcaacacttaccccctgaagcccggcggaatttcgttatccggttcagaaatatgattcacacaacgctggttgttcgtgccgcttaccgggagcaaccaggggttctcaaaattccggtccggtccaaaaaacgtcgtcgctcgctgaacaaattccgttcccgttttcccggtagccgccaagtatcttgcgtaacgcctcacgccatccagcatggcctctggcggcaccccctcgcgtaatctggccttccaggcactgaaagcggatttcttcgggtttgccccagcacgcaacgggtactcccgccagacctgttcgaacacatccggataatccactcgtcccacagactgcccggtgttttccgggactacccgatcggcttcccgctgaatggcggaatcggcttcaggctgctgcagttggtgtgattgctccgcccttgcggtcatcacctgctgcacagcgcccgaatcggctttcagcgcatacgctgaatcggcttccggtgtcgtgcctgctggctgaccaagattgacggtctgaacatcccctgcctggttcgtggcgttttttacgccatggaccatagtgttttgatcttcttgatctgtatctgtatctttatctgtcgtgactcgtcgtgacatgtgcgtgacatttcgtgacgcgccgtgacaatcgccattttgttcccgctttctttccctctctcgctgcgccctcttgcgctctgcaggagattttgcggtttgcgaaatattgccgttgtcctctttaagcacctggcgtttttcccatccagtgattaaatcaccatcaagtacccgcccctgcatcgtctgcaaaattgaatcaattacctcttctgtcacgtcgagcgcacttgccaaatcttctgtcgtgacatcaatgtgacctcgcgtgacatttcgtgacgcgctcaccaggaggtggatatacactgccatcactgttgcaattggctgccctgacaccctggcaattgttcgccacttagggtcatttggcatgtcatgccataatctgagccaggcgttagccatactcacctcttttgataccgaatctttttactcacaaattgccggaagtgatccggtatgaatattgcgagtcaatgcacagccacaatatttcctgcagggccaccacgattcatctggttgaaaccagcgatcgccactgcgacaaaatcatcagcgtctctcaccagtcgttcccgcgtctccactagttcccgaaaataggctgagctatggctgcgcattcgggccaccagcagaggtggcattgatttttcgatagctggtaacaacgcctgaattttttcaactgcatcaggggtgtctttctctacccagcggaaaattttctgggtattgcgagccagggcttccggatggctgtcgtcatacagttctgggaacgtcatacccagttcaaaataagccctggttatttcagctgccggaactttttcaccgtccggatgcgcccaggcattcatcgccatgcggatgtgttcatgcttgattttcatgaatcaagctcctagaaagtggttgtgttaacattttggtatcttccagctcgggccaaatattcatccaatcaaaaggccttagttgctgacgtgtaacttcaccattactggctcgctcaataaggacacataacgatgcccctaacacttgacctttactcaatgcctttcttagataaccgatgctggtaccacactcgcatgcaaacatacgctgttcatctgacgaaagagaattgagaaatattcttaattcttccatagctactccttagtaaacacagcaaagaatacccacaggtaaacaaaagtcaatacccacaggttgtttaccttgcagtaatcgcatctattatttacctatggacaaatatgaatttagacgacagcaactcatcaaaattcgtgatgagaaatgcgatggtaaagcggttaacgtggccagaaagatcgggcgcgagccttcttatgtatcaagaatgttgtacccagaggggaaaaagggaaaaaaacggatcgctgatgatatggtggagattatcgaagagtcctttgggttaccccggggatggatggatggtatcgtttcatcatcaacgaacacagcctccagttatgaaacaagggttctaacgccacgacaacgtatttttttagatctcttagacgaactgccagaaagtgaagcggataacttattaaaaactcttgaagagaaaaaacacgtattacaatatgatctacgaagaaatccagtaaaaagaaagcacaaaacagcatcatagctcaccaaacaactatgtcaccagttaagacaccgcaaaaagttacccatgggtatttactttttaaatacctatgggtatccttcttttcataccaacccaccccgccccacagaatgcagggcaatacttcgagttaccaggcagtggtcaggggttaagtagccagcccgaggcagtaagaacatgacaggcagggttcaactttaataactatgcagcaggtttttg

SEQ ID NO: 973 - DNA, 255 bp, Escherichia coli
atgcacatgaccgccatgaacacccctaaaaaaagggcatttatatatccaaatattaatatcaaaacatcaactttttccatataccttgctgtgaagatgatgggcatacatgatacgaacaaccagaacgcaacaaacaaaaactgcaatgcgtttttcattattcctcctacaatcaatgtgcaattacatttaaacacacctcaatttggccggatatataaatatctaaaccagaaaaaatcacttaca

SEQ ID NO: 974 - protein, 85 aa, Escherichia coli
MHMTAMNTPKKRAFIYPNINIKTSTFSIYLAVKMMGIHDTNNQNATNKNCNAFFIIPPTINVQLHLNTPQFGRIYKYLNQKKSLT

SEQ ID NO: 975 - DNA, 255 bp, Escherichia coli
atgagcgaggttaattatcaggaagggcatgaaacggcggggcaagcaaaaacagtggcatggcgatatcgctacgtgaaaaaaaaggcgttacggactttcaggggaagtagtggtctggtgactggaaatatgtaccgaaaaaagaggattgtaacgacaggccgaactatgaaattcaggccttattcactgccccgccagtcccggttacatcagaagaactggttaaagctgtgcacttttatgaacaac

SEQ ID NO: 976 - protein, 85 aa, Escherichia coli
MSEVNYQEGHETAGQAKTVAWRYRYVKKKALRTFRGSSGLVTGNMYRKKRIVTTGRTMKFRPYSLPRQSRLHQKNWLKLCTFMNN

SEQ ID NO: 977 - DNA, 174 bp, Escherichia coli
atggctgattttggttcaactaaatacaacgtcagttttgaagaatggcatgaactgttaatggactatgcagagttacgtggtggcagtgctgctgatgctgaagcatggcgtgatgattatgaagcagaaaaaactccggtcgaagcatattgtgatgagtggggcgatgaa

SEQ ID NO: 978 - protein, 58 aa, Escherichia coli
MADFGSTKYNVSFEEWHELLMDYAELRGGSAADAEAWRDDYEAEKTPVEAYCDEWGDE

SEQ ID NO: 979 - DNA, 180 bp, Escherichia coli
atgcgaaagtttaaaataattattgaaacgggaatagccggtggagatttcgaggatgaattcgaagtggatgatgatgcgacgcctgatgaaatacatgacgaagcaaaagatattttctttaactactgcaattactcatatcacgaaataaaagacgaagaggaagaacaaaatggc

SEQ ID NO: 980 - protein, 60 aa, Escherichia coli
MRKFKIIIETGIAGGDFEDEFEVDDDATPDEIHDEAKDIFFNYCNYSYHEIKDEEEEQNG

SEQ ID NO: 981 - DNA, 354 bp, Escherichia coli
atggaaataaaaccagaggatgagttaagcaatatcgttttatttccggtaaaagaggatgaccctcgtaatcaggttaattttctttatgagccatcggaaagaccatattgtcatcacgcctctgtccgggttgacgaaaaagagcgtcaggtccgctgtaaaatctgcggtgcagttgtggagccatttgactggatgctctctgtggcgaaaagagaaaccagactggcagatgatgtaaggctcttgcgtcaggaggagcgggaaaggcgaaaaaatatagaaaagctaattcagattgagcgtaacgcgaaagcgcggatacgcagggcgacaaaatccagaactgaa

SEQ ID NO: 982 - protein, 118 aa, Escherichia coli
MEIKPEDELSNIVLFPVKEDDPRNQVNFLYEPSERPYCHHASVRVDEKERQVRCKICGAVVEPFDWMLSVAKRETRLADDVRLLRQEERERRKNIEKLIQIERNAKARIRRATKSRTE

SEQ ID NO: 983 - DNA, 420 bp, Escherichia coli
gtggcaaaagtttttacacaagaagagcgagaaaaaattaaagggcaggttgttgaactcgtacgccagagtgggcgtgagacgttacggcaactggaagtcaagacaggtgcgacaagatatctgatgagcgttctcgcaagagagctggttgccagcggcgatgtatacaactccggctacgggttattcccctctgaacaggcgcgtaaggactggcaaaacgcccgcaaaaaactctcgagggcaaaggtgaagaaacctgctgtggttgatccggaccttatctggtcatcacctgacggagaaatacgtcgctacgacagtcgcctaaacataatctgtcgcgagtgccggaagagtgaagctatgcagcgtgtactggctttctatcagggtaattttcaggaggcggtactg

SEQ ID NO: 984 - protein, 140 aa, Escherichia coli
VAKVFTQEEREKIKGQVVELVRQSGRETLRQLEVKTGATRYLMSVLARELVASGDVYNSGYGLFPSEQARKDWQNARKKLSRAKVKKPAVVDPDLIWSSPDGEIRRYDSRLNIICRECRKSEAMQRVLAFYQGNFQEAVL

SEQ ID NO: 985 - DNA, 585 bp, Escherichia coli
atggtccatggcgtaaaaaacgccacgaaccaggcaggggatgttcagaccgtcaatcttggtcagccagcaggcacgacaccggaagccgattcagcgtatgcgctgaaagccgattcgggcgctgtgcagcaggtgatgaccgcaagggcggagcaatcacaccaactgcagcagcctgaagccgattccgccattcagcgggaagccgatcgggtagtcccggaaaacaccgggcagtctgtgggacgagtggattatccggatgtgttcgaacaggtctggcgggagtacccgttgcgtgctggggcaaacccgaagaaatccgctttcagtgcctggaaggccagattacgcgagggggtgccgccagaggccatgctggatggcgtgaggcgttacgcaagatacttggcggctaccgggaaaacgggaacggaatttgttcagcgagcgacgacgttttttggaccggaccggaattttgagaacccctggttgctcccggtaagcggcacgaacaaccagcgttgtgtgaatcatatttctgaaccggataacgaaattccgccgggcttcaggggg

SEQ ID NO: 986 - protein, 195 aa, Escherichia coli
MVHGVKNATNQAGDVQTVNLGQPAGTTPEADSAYALKADSGAVQQVMTARAEQSHQLQQPEADSAIQREADRVVPENTGQSVGRVDYPDVFEQVWREYPLRAGANPKKSAFSAWKARLREGVPPEAMLDGVRRYARYLAATGKTGTEFVQRATTFFGPDRNFENPWLLPVSGTNNQRCVNHISEPDNEIPPGFRG

SEQ ID NO: 987 - DNA, 441 bp, Escherichia coli
atggctaacgcctggctcagattatggcatgacatgccaaatgaccctaagtggcgaacaattgccagggtgtcagggcagccaattgcaacagtgatggcagtgtatatccacctcctggtgagcgcgtcacgaaatgtcacgcgaggtcacattgatgtcacgacagaagatttggcaagtgcgctcgacgtgacagaagaggtaattgattcaattttgcagacgatgcaggggcgggtacttgatggtgatttaatcactggatgggaaaaacgccaggtgcttaaagaggacaacggcaatatttcgcaaaccgcaaaatctcctgcagagcgcaagagggcgcagcgagagagggaaagaaagcgggaacaaaatggcgattgtcacggcgcgtcacgaaatgtcacgcacatgtcacgacgagtcacgacagat

SEQ ID NO: 988 - protein, 147 aa, Escherichia coli
MANAWLRLWHDMPNDPKWRTIARVSGQPIATVMAVYIHLLVSASRNVTRGHIDVTTEDLASALDVTEEVIDSILQTMQGRVLDGDLITGWEKRQVLKEDNGNISQTAKSPAERKRAQRERERKREQNGDCHGASRNVTHMSRRVTTD

SEQ ID NO: 989 - DNA, 423 bp, Escherichia coli
atgaaaatcaagcatgaacacatccgcatggcgatgaatgcctgggcgcatccggacggtgaaaaagttccggcagctgaaataaccagggcttattttgaactgggtatgacgttcccagaactgtatgacgacagccatccggaagccctggctcgcaatacccagaaaattttccgctgggtagagaaagacacccctgatgcagttgaaaaaattcaggcgttgttaccagctatcgaaaaatcaatgccacctctgctggtggcccgaatgcgcagccatagctcagcctattttcgggaactagtggagacgcgggaacgactggtgagagacgctgatgattttgtcgcagtggcgatcgctggtttcaaccagatgaatcgtggtggccctgcaggaaatattgtggctgtgcat

SEQ ID NO: 990 - protein, 141 aa, Escherichia coli
MKIKHEHIRMAMNAWAHPDGEKVPAAEITRAYFELGMTFPELYDDSHPEALARNTQKIFRWVEKDTPDAVEKIQALLPAIEKSMPPLLVARMRSHSSAYFRELVETRERLVRDADDFVAVAIAGFNQMNRGGPAGNIVAVH

SEQ ID NO: 991 - DNA, 279 bp, Escherichia coli
atggaagaattaagaatatttctcaattctctttcgtcagatgaacagcgtatgtttgcatgcgagtgtggtaccagcatcggttatctaagaaaggcattgagtaaaggtcaagtgttaggggcatcgttatgtgtccttattgagcgagccagtaatggtgaagttacacgtcagcaactaaggccttttgattggatgaatatttggcccgagctggaagataccaaaatgttaacacaaccactttctaggagcttgattcatgaaaatcaagca

SEQ ID NO: 992 - protein, 93 aa, Escherichia coli
MEELRIFLNSLSSDEQRMFACECGTSIGYLRKALSKGQVLGASLCVLIERASNGEVTRQQLRPFDWMNIWPELEDTKMLTQPLSRSLIHENQA

SEQ ID NO: 993 - DNA, 27324 bp, Escherichia coli
  misc_feature (714)..(714): unknown
  misc_feature (721)..(721): unknown
  misc_feature (769)..(769): unknown
  misc_feature (775)..(775): unknown
  misc_feature (786)..(786): unknown
  misc_feature (796)..(796): unknown
  misc_feature (2631)..(2631): unknown
  misc_feature (2656)..(2656): unknown
  misc_feature (2708)..(2708): unknown
  misc_feature (2727)..(2727): unknown
  misc_feature (2749)..(2749): unknown
  misc_feature (3232)..(3232): unknown
  misc_feature (3309)..(3309): unknown
  misc_feature (3572)..(3572): unknown
  misc_feature (3600)..(3600): unknown
  misc_feature (10369)..(10369): unknown
cagcaacctcagcaacctcagcaacctcagcaacctcagcaacctcagcaacctcagcaacctcagcaacctcagcaacctcagcaacctcagcaacctcagcaacctcagcaacctcagcaacctcagcaacctcagcaacctcagcaacctcagcaacctcagcaacctcagcaacctcagcaacctcagcaacctcagcaacctcagcaaggtttattctattttgatgatctgtcaaatgttctttgttaatttcatctctaattagctgttctttttctatgctgtagtttttgtcattataagtcacatcaaaatcatctaagaaaacgatataaatcaatttaaaacaactagtcttaaataaaaaactatcgcactcatcaggaaaaccaaaaaagaaaatattaagatatttggttgctttgcgcttgtcttttagtccattataatacttatttgcttctgctctttgtttttcatactcactacagaaaaaactctttttactttcatcccattctgaagcatcaatttcaagtttatatgcttgtttggcacctttctttctggctaaaaaagtaaggtaatatctattcgaatttatctccagccgtatattagattgaattttaccaaaataaattgctggcttattatatctaattccttctttatagatgattagttgaaaagtatctttataagtanctaactncataagggggaattgataatggttcatagagattatctccattaatgnagtagnctactaccggnggggatgctngaagatgacacagggtgtactttacctcccaaatctttttcatcatttcgcgtctgtttgataattcttctgccagaagagtcgtaatttctttcagacacatcaagtttcagaagagatatagctaatgccggtggtgaattatgctttttattattctttgagttacacttatttttactcttaggatcatgaatcttacatcccggcctatgagtctctttatatcgaaagtatgattgatttaaatttatttctttgaagctacatggagtagcgggtatcctacatttgtcatacgggcattcaaaagtggttgttcgtatataaagatcatccatttcccgaagatcatgaccatgaacaatttcaccactaacagaatctcttgctattgtcacacaatctcctttgataaaaattaatagattctaatttcacaccaaggctaatttaaataaaggctatttaagagaaaaacaagtcagcctgacagacatatcccctcccatggcaatatgccgctatttcgcgttttttttcatgccataatgcgtttcaaggtagcgaatatcttcgattgcccatggtgtgcgcattcttttgggtttattttccattaccatgttttatcagccatcatggctgcctctccggtttgccagcgtgttccacctgataacgattaatcagctgattcagtaccatttcagcctgtttttgctgctgttcactgccattctggttacgggcttcatcatagcgacgtaactgctcttccgccgggatatgccggttaaaagcctgcatgatgccaaacacctccgttctcagttcactgaccgtcatgtattttccccgctgttcatccagacggttcaggcgttcagccagctgctgtaagcgggtcatgccttcattccagcccgtcatcgcctcttccgggagcgcacgactccttacgctcttctgccagttatccaccatttcctgaacatggggattgtcggggaaaagtaccatcagttgctgcagcaactgcgcactgcgctgcaggttatatgccgggggtaattctgtcagtcgcgttatctgctgaccggaaagggttaaccatgatcgaccagacggttctgcaatgtactcatcagcagattaattcctttcgcccccagacagtgcccgaccgccccgttggcgattttttgtaaaggcagccagtgtggtaacgcatcagccccctccagttccgtctgtttaatctgaaaacagggcgtttcaacaggaaaattaatcttacgtgcaaaagagccaggtgcagaaaggcgaacatcaggggctgaaggcatcagttgttgctcaagggcttcctgacgctgctgctgaatgataaatgcttcatctccgctacgccggacatccgctgcctgaagagataaaggcgataataaagcagacatcagtgtcagtgacagcaaggacggacagcgccggaatacgctttgttcctcagccctcacgttcctgcaacataattttccagtcaaacgaaaaaccttttattcatgccataccaacaattaccagcctcctgacgatacctcccaccattttttgcaatggcacgctaccgcctttccggtatttacccacatcaaccggtaccagaatgctgagtaataaatctgccaatttttagctgacttaattttgatcattatagaataatgatctgaactacagcaatatggcagatttatcggtcaatataatacaaatgaacagttctttattctgactaatatcgcaaaaacagcgcattacaaaatttatanccataattaatggaaaagtgcaganaattattccactgaatgcttttaatacaagttggttagcttaaaaaatagcnatttttgatttcaagtcantgaaaattgcaatgcgtgacgnttcaacagcatttaagtgagtttcaggatatgggaaggacatgaaaagaggagcgcaataaaatacacaggaagaaggggaaaatgtttcgtaaaaacagaaaattaacagccgcacatcaggaaactgcagtctcctgattcagtgctaccacatgaaaatttagttaacctgttaccgtactaaaatttatgtcagaagatgttccattaccgaaagtcaatcagcgatacaaagacgatcatggagcactggccaccgtaaccagcgtcgaagaaacccgagtggtttttatgcgggagggttatccgcatccctgtatgcgaccgatgtacaactttctgggaaaattcaaacccgacccccgggaagaaacagaataaaacgaaatccctgccggcaatcacactgcctgatggcagcataatccacttattaatttctcatccccggagacaagccctgaaaaccactccgggtgtncattgtatgccgtgttcagcgcatcccaggaaacgttgatataaaagctgtcctgcaatttgcggggtaaccacctntaccacccggttccggttatactccagtccggcataacctctctctgccagccactcattcagttcatgttccagagacagattgataatatcgtaatcggaccttgccattcccgtttccttagcacatgttttcaggcacggggataaagtataaagaatgtcgtactgctgctgccagagcaatattccccctgatggttgtatcagagatggtatgccggtattttgcgggttgttcccgtcaggttatcgtgcacctncacggtcgttgtcaccaccggcattccntctgtcttagtctcaggacatcagccgcaatacgctgactgcagaccagaacaggccggtccagtgcggtcaccagtaaccccgcctccagcgcatacttcagccgttcacggggcgctttcacttcccgggcaacctgctgatatggcaatgatgtgttttcattcccaaccacgcgacgaatacggtgagacagatgataccggtatgtatccggcacactggaaagactggccttcaggctgtacacgcagccaaagcgtttatcgttgaacaccacatttttctggctgatgtcccattcttcacgcagcacagcaatcagttgtggtgtccgggtaagcagaaaggcaattcaaaacaggtgacgtaatccacattcagcagggcaatacgcggccatttttctgatccatttacaatcggatgtgggcgaacattattatcattatctgaaaatctccccctatggcatgtttgccatggcggagagtcattgaagcctttatgaggggtgaatacattcctgaagcagtgcagtggcaaaaaaacaccccgcttttattcattctctgacaataaatattgagtttgactgtatcagattttaggtatttcctagaaaaggacttttttgctcaaggcaaaacaataccgcaaaataatccttcacctgcacaaacatcctcagtccattaaaaaaatcgccatgttaggttaacgacatcaaatttggtcgtttaccatgattaaggtagttacacatggccccgctattatttttcgtgccccaaaatttattttggtgaagaggcaataacctctctatgccaatttaataataaacgagtcggtattgtcaccgatgattttatgatgtcatcaggtaaaactcgttatttaataagccatatgcctgaggcatcggtatgcattttcggcgaggttactccggatccagatattgatattctgacttccggcgcggcgcgttttaaagcctttaagcccgacgttattatcgccctcggcggcggctcgtcgctggacgctgcgaaaggaattaaagtcacattggaagagtattttggagatcatcaaatcgatctcattgctattcccacaaccagcggatccggctctgaagtgacgtcctacgcgatcatctctgatccgcaaaatggccgcaaatatccgttgatctccgggcaactggtgccggaaatcgccattctcgatcctaacctagtgttaaccgcgccgcgtcatgtcgcggtagataccggcatggacgtgctgacccatgccattgaagcctttgtctctactggctcaaatgactttagcgatgcgctggcggaaaaagccatcgcgttgacctggcgctatctgccgcaggtgtttaacgacgaaaaagacattgcggcgcgcacccacatgcacaatgcctcctgtatggcaggcatggcatttaactccgccgggctggggttggttcacggcatggcacacgccatcggcgggatgctgcatattcctcatggcaaaattaacgccatgctgctgccgattgtcatcgacttcaacagcaaacgggccagcactgaaacccgcgatcgctatcaccgttgcgcgcaaatcataggcattgaccatgcggtaccggagcaggccatcgcgctgatgactcaggagatccgccagatcaatcgccatttctgcatccccgtcactctcagcgaactgggcatcgaccgtgcaaaaatcatcgagttgcgcagcgcactggtgaattcgacgctggccgacggttgtaccgcgtcgaacccgcggcaggtgacgacgcatgatgtcgaagggttgatcgacctgattaccggctagctggataactttgttcagcctccgtgaagcagtcaaaaaagtcctgctgataaacaaaaaccgggcgtcgttactccctatcctgatcgttagacgcccattacccataagataacccaataatcaggtcgtacccattatgaattacaccgaacaacaagccgagtggattacccaacaaattttgcaggaacttgccaccagtaaaaaaacggcagcgcctgctgccgcgcccgtcgcgctgaatattccggtgggcgtgtccaaccgccatgttcatctgtgccgtgaagatatggacattctgtttggctacggctctacgctaacccgttctaaagcgttgaaacagcccggtcagtatgccgccgaagagatggtgacgctgcgcgggccaaaaggcgagctcaacaaagtgcgcgtgttagggccactgcgtaatgccacgcaggtggaaatctctgtggccgacggctttgcgctgggcactaaagctccggtgcgcatgtcgggggatctgctggattcgccgggcattgaaatcatcggtccgaaagggcgggtggtgaaacacaacggcatgattgtcgcctggcgccatatccatatctcgcccgaagaagccgaactgcacggcctgcatgacggaatggaaatcgatgtgcaaacaaacggtccgcgcggtggtgtgctcagccatgtagtggtacgcgtcacggcggatgcagtgctggaactgcatattgatatggaagaagctaacggcgtcggtctgcgtaatggcgataccgttcgcggcataaaacaggctgcgcgccatggctaacagccccgaaaactgccgatttcacgaattggccgcgctgattgacagcggcgaatgtcggccctactccggcgcgttgaaggtgggggggatctcggtaccgccaatatcgcaatcgtggtgctggatgaagataaccagccggtggcaggggtaatgtatccctccaatgtggtgaaagacggcgtggtggtggattacctgaccgccagccgggtagtagcacgtctcaaacaaattcttgaacagaaacagggctgcacgctggagcgcgcggcgatcgcagtcccaccggggatctctgaaggcaacacaaaagtgatcgtcaacgtagtggagttggcgggttttatcgtgacccaagtactagatgaaccggtagccgctgccagcgcgctgaatattaaaaacggggcggtggtggatgtcggaggaggcaccaccggcatgagcattttgaaaagcggtaaagtgacgttcagtgccgatgagcccaccggtggaagccatatgaagttggtgatcgctggcgcgctgggcttgccttatgccgaggcggaagaaatgaaaaaaaacgggcaggaagcgcaggtctttaccctggtgctaccggtggcccagaaaatggccagcttggtgtcgggatggttcgctacccagcaggtaaaaaatatttatttggtaggtggcgcgagcagcttcagccagtttgccaacgtgttcagtaaacaaaccggtaaaaatgtgattccttcggcagagccactattggtcacaccattaggcatcgccatgaatgcggaccaggggtaaatcaatggacaatcaaaccttatcgcaactgctggaccgggtcatcgctgaagtgttggcacaatccgtcgcgcagaaaaatgtctgcgtagtggtgactggtgaggatatctcctcgctgccggaaacgctgaactgccttgaggcgcttgagctggcgggttatcagttgtgggtaaatttttctcacagcgccagccagtcggcgctgaaatctgtctgcatggatgcgctaattcagcgtggttctcgtgctggatttgacagatcgccgcctcactatgaggtgctctatctgcctgcgctctctgtcaacagcatgagcaaaattgcgctgggcattcgcgataatctggcctgtgaaactgtatttcaggcgttacagcaccgtaaacagattatcgccacgctgcatcaacaatgcgtcgatagcgaattaccgatgccactgctgtcttgtctggaaggttacgctcaggtcctagagagctatggcattacgcttttcggtaaacgtgcagcccatgtcaagtcggtgcaaggaagccaatccaccctgacagtagccggtaaaaaacgtttaatcacccagagcgatatccgcctactgaccattggcacagtgctgcgcattgagagcgacacgctgattacccctgctgccagagatgaaatccagcggcgtaatctcactgttatccatggttaaccggaggaaatatgtacctcgctaaagttactggcgcattggtttccaccaccaaacacgcctcgctgaatggctcaaaactgctgatagtggcgcggctcgatgaaaactatcagccgactgtccatgcccaggtggcagttgatactgtcggcgcgggcaatggagagattgtgatcatcaccaccggcagttcggcgcgtatgagcaacaacaaagatcactcggtgattgacgctgccgtggtgggtatcgtcgactcgctcgaacttaacggttaatagcggcgcgtacgctgaggaatacttatgtctgcgaatgaggcttcactcgacaactggattaacgaggctattgccacgcagttaccggaactccggatgtcgctgagcctggaggacagtgaactgctggcaaagttggtccgggaaatggcacagtccagcaatgtatcgatcgtttttagcctagtggatgcctgcggtcagcagcgttttttcttcagcatggataacgccctgctggtcagccataccttggcaccacaaaaggcctggaccgcggtagctctcaaaatgccaactcacgaactggcaacgctggtacagccgggtggtgatttgtacggccttgagaaagaaaaagatatctgctgcttcggcggtggttttccctgctggtcgggcaggcgcttactaggcggcatcggcatcagcggcggcagtgttgaggaagatatgctcatcgcccgccaggcgatggcgcagtttagcgttctgcgttatcccctcacaacaacccgttaattttttgcagtccatttcagggggcatcatgtctttagcttgtgtattagtgattaattgtggttcctcatcaatgaaattctccgtcattcctcaggatgcagatcagccgttgctgtcgggcctagcggaacgactgggtattgatcatgctgtcataacgtttaaagaccgagacggccataaatccactgtcgcgctggatgacgccagccatcagcatgcgctcaaagtgctcttcgcgaagctcgacgaacagcaactgttggaagccatcaacgccgttgggcaccgcgtggctcatggcggcagcgacttcaaaagatcagtactggttaccgatgatgtgatcgaaaaagtccgcgcgctgtcggtgctggcccctttgcataaccctgccaacctgattggtattgaagcggctcgggctctgttgcccgcgttgccgcatattgcggtgttcgatactgcgttccaccagaccttgtctccggctgcttacacctatgcgatcccgctggagttccagcaagattatatggtgcgacgttacggctttcacggaacatctcaccgctatattgccgccgaggcgcttgcatcactagatctcgacccggcggatcatggcatcgtgattgcccacttgggcaacggttcatcgctatgtgcggtgcaaaacggcacgagcattgacacctcaatgggtatgaccccgctggaagggctggtaatgggcacgcgctgcggggatcttgattttggtgtcgtcgcatatctggcgaaacgcacaggtcaaacgttcgacacgctgtacaaaatgctcaataaccagtccggcctaatggggatttccggcttatccagcgattgccgcacccttcagcaggcgcgtgatgagggccacgaacgggcagcgttagccatcgacgtgttagtacatcgtctcgcacgacatatcggcggccacgtgacctcgcttaaacgcttcgatgcgctgattttcaccggtggaattggcgaaaactcggcgttaattcgagaacttaccgtgcaacgccttcaggcgctgggattggaactggataaagaacgtaaccagcagctgttcggcggacgtagcggactgatttctaaaaccgacaccacgaagattgcggtcatcccaaccaatgaagaaaaaatgattgctatagatgcagcggagattgcccgcacggcataactaattggcaaaaatacgacagttttaacagtaattatgatcgctattcagagcggggctattttgcaaggaagtttaaacgcagatcttttattacaaacctcgggtggattttattgtcaattgcgggaatgcaaaagcaagatagtcccactgacgcgcaaaacattttgtctgaataaccttagcattatgataattaaataattaatgcacatgggtgaatccgtagattgctattcctctgtgcacgttttctttctatcggaaatattgaggtcgttatgcaacaagaagcattaggaatggttgaaacgaaaggtctggtttctgcaattgaagctgcagataccatggtgaaatctgccaacgtgaccctagtgggttatgaaaaaatcggctccggcttggtgactgtgatggtcgcggcgactgttggcgcagtgaaagccgcgacagatgcgggctccgctgctgcgagtaaagtgggagaactggtctcctgnacatgttattccacagcccacacattgaggtggaaaaaattctaccgaaggctatcggttaataacaataaaggatactgatcatgagagataatcttgttgagcagattatatctgacgtaatgaataaacaaaccgatatctcaccggaagctaaaacagcagcaaatttcgctggttgcggtattacaggaatttagtcggcactgcgttgggccacactatcggcctagtgattgccaatgttgataatcaattgcatgaagtcatgaatatcgacaagaaatatcgctctatcggtattcttggcgcacgtactggcgcaggcccgcaaatttttgcggctgacgaagcgattaaagcaaccaacagcgaaattatttctattgagctggcccgcgataccgaaggaggtggcggacacggttgcttaattatttttggtgcgtctgatgtttccgacgtcaggcgtgcggttgaagtggcgctgtctgaaattgaacgcaccatgggtgacgtttatggctcgtcagccggacatcttgaattccagtacaccgctcgtgccagctacgcgctgaataaagcgctgggtgcgccgattggtaaatccttcgggatgacctgtgcctcgcctgcggcgattggcctagtgattgccgacgctgcggcgaaatccgccgtgattgacccggtgggttatgccagcccgtcgcaaggcaccagctttagtaacgaagtgatcttcaccttctccggtgattccggtgcagtacgtcaggcggtgattgccgcgcgtgaagtcggtctacaactgctctccacgttagatccggtggaaattaaatccaccacgacgccatatatctaagcatctgatgacgatgcacgcggcgcggtcggtagatgaagagtagtaaggaatttaaagatgaatgatattgaaatcgctcaggctgtctcgaccatcctgagcaaattcaccaaagcaacaccggatgaagctcccgccacgtcagaagcagcgcgggtcgacgggttggatgaaattgtcgctaaggcgttggcgcagcactcttccgtgcgcgacgccagtgcgatctctcaggtagcgaaggtagcgaatgctagcactggagcattcgataccatggatgaggcgatttccgccgccgtcttggcacaggtgcagtatcgccactgttctatgcaagaccgcgcctcgtttatcaatggcattcgcgatgtcttcctgcaggaagatgtgctgtgtgccctttcccgtatggcggtggaagagaccggcatggggaattacgaggacaaactgatcaaaaaccgcgtcgcagcgctgaaaacgccaggtatcgaagatctgaccaccagcgcggtttccggagacgggggtttaacgttgatcgaatactctgcgttcggagtgattggttcgattacaccaacgactaacccgaccgaaaccattatcaacaacagcataggcatgctggcggcaggcaacactgtggtgttcagtccacatccgcgctcgcgcaaagtgtcgctgtacgcggttgagctgatcaacaacaagcttgcccagttgggcgcaccggcgaacatggtggtaacggtgaccaaaccgtccatcgacaataccaacgtcctgatcaacgacccacgtatcaacatgctggtagcgactggcggtccagccatcgtgaaaaccgtgatgtcatcaggtaaaaaagcgattggtgcaggcgcaggtaacccgccagctgtggtagatgaaacggcggatatcgaaaaagcagcccgcgacatcattaagggctgtagcttcgacaacaacctgccgtgcgtggcggaaaaagaggtgattgttgtgaaccaggtagcggactatctgattcactgcatgaagaaaagcggtgcctatctgttgtgcgataagaagttaagtcaacaactgcaatcgttggtgcttaatgaaaaaggcactgggccgaataccgcctttgtcggcaaagatgcgcgctatatcctgcaacaactgggaatccaggttggcgacgatatcaaagttatcttaattgaggctgagaaaacacatccgtttgtggtgcatgagctgatgatgccggtcctgccggtggtgcgcgtagacaatgttgatgaagccattgagctggcggtgaaagtggagcacggcaatcgtcataccgcggttatgcactccaccaacgtcgaaaagctgaccaaaatggcgcgcctgatccagaccaccatctttgttaaaaatggtccctcttatgcagggcggggagcggtgaagggcatgccacctttacgattgccggaccgaccggcgagggacttacgtcagcgcgttcgtttgcacgccgtcgtcgctgtgtaatggttgaagcgctgaatattcgctaactatcgcgaagggtgacttaaagatgaaaaaactgaatcataaacgcaccgaccccggatattttggctatgttgaaacggcgtatgcccggggagtttcgttcgcgtttggatttgattcgcatcgaccgccattggtttgttaatactgccggttccggatctctatttttatgccgacgtagccagtaaaagcgccaatgtggtggtatcagaaatctttggcagttgccctcagcatatcaccacattggccatttttggcgaagtcgcggcggtgcatgaagccatgcgaatcattgaggaagacgataaccagttttgagagtccgcttatgaagaagatattacttatcacaggcgatttctctgaagactatgaagtcatggtgccatggcaggcattaaacatgttaggtttcagagtggatgtagtgtgtccgggaaaacgtaccggcgagtttattaaaaccgcgattcatgattttgaaggtgatcagacctacaccgaaaaacccggacatctttttagattaactgcatcatttgatgacataaggttacaggaatatagtggtgtttatatttctggtgggcgttcatcggaatacttgcgattaaataagtcagtattggatatcgtgcattacgcgatgaatttaacattacctgttgctgcaatttgtcatggcccacaaattctggccgctgctggggtattaaaaggccggaaactgacgggatattttacggtaaaaccggaagtggaaatggcgggtggccagtgggtcactgccgcagatgatgaagccattgtggatggtaatttaataaccgcgactacctggatggggcatccagcaatattacgtcactttattactcaaatgggcactagcattattcattaataccctggcatctccgcaaggttaacaaaatatattcgggagttttatatgttagagaaaggcttttctaatccgacagaccgtgttgtaagactgagaaatatgatcctgacggcgaagccgtatgtggaatcagaacgcgcggtgttagcaaccgaagcatataaagaaacagaacaactgcccgcgattatgcgtcgtgctaaagtggtggaaaaaatctttaaccaattaccggtaacaattcgcccagacgaattaatcgttggagcggtaactattaatcctcgctcaactgaaatctgccctgagttctcctacgactgggtggaaaaagagtttgagactatggaacaccgtattgccgacccgtttgttatcccgaaaaagactgctcaggagcttcatgaagcatttaaatactggccgggtaaaactaccagtgctctggcggcatcttacatgtcagaaggcactaaagagagtatggcgagcggtgtattcactgttggtaactacttcttcgggggcgtcggtcatgtcagtgttgactacggtaaagtgctgaaaattggtttccgtggtatcattaatgaagttagccgtgccttggaatcattagatcgcactgaaccaggatatataaagaaagaacagttctataatgcggtgctgatcagttataacgcagcgatccgtttcgcccatcgttacgctgaagaagcatcccgtctggcgcagcaggagagcaatccgacccgtaaacgcgaactggagcagattgctcaaaactgtactcgcgtgccggaatacggtgctaccacattctgggaagcatgccagacattctggtttattcagagcatgttacagattgaatccagcggtcattctatctccccggggcgtttcgaccagtatatgtacccgtatctggagtcggacaaatctatctcgcgtgaattcgcgcaggaactggtggattgctgctggatcaagcttaacgacattaacaaaacgcgtgacgaagtctctgcccaggcgtttgccggttacgcagtgttccagaacctgtgctgtggcggccagacagaagacggtcgcgacgcaactaacgatctgagctacatgtgtatggaagcgactgcccatgtgcgtctgccgcagccatccttctcaatccgcgtatggcagggtactccggatgagtttctgtatcgcgcttgcgagctggtgcgtatgggcctgggcgttccggcaatgtacaacgatgaagtaatcatcccggcgctgcagaaccgtggcatttcgctgcgtgatgcgcgtgattactgtatcatcggctgcgtagagccgcaggcaccgcatcgcaccgagggctggcatgacgccgcgttctttaacgttgcaaaagtgctggaaatcaccctgaacaacggtcgcgttggcaataaacagctaggcccagtgactggcgaactgactcagttcaccagcatggaggacttctacaccgcgttccagaaacagatggcgcacttcgttcatcaactggttgaagcctgtaacagcgtggatattgcccacggcgaacgctgcccgctgccgttcctatcagcactggtcgacgactgtatcggccgtggtaaatctctccaggaaggcggggcgatttacaactttactgggccgcaagcattcggcgtagccgataccggcgactccgtctatgccatccagaaacaggtattcgaagatcgtaaactgtctttgagcgaactgaaaagcgcactggacgccaacttcggttatccggtgggtgcgaacccgcacactccagcggcgaaatcctcgctcaacgagcaggatatctacgatgtggtgaaacgcatcattgaacagcatggcgcgctggatccggcagcgattaaaaacgaagtttatcgccagctgacttccggcagtgcagcaccggtgcaatccggcactatgtcccgtcacgaggagatccgtcgtattctggaaaacacaccgtgcttcggtaacgacatcgatgacgtggatttagtagcgcgtaaatgtgcgctgatctactgccaggaagttgagaaatataccaacccgcgcggtggccagttccaggctggtatctatccggtgtctgcgaacgtgctgtttggtaaagacgttgccgcactgccggatggccgtctggcgaaagagccgttggcggatggcgtatctccacgtcagggtaaagacacccttggcccaaccgccgcagccaactcagttgccaaactggatcactttatcgcctccaacggtacgctctataatcagaaattcctgccgtcttctttggctggcgagaacggtctgcgcaacttcagcggcctgatacgtcactacttcgataagaaagggatgcacgttcaatttaacgttatcgaccgcaacactttgatcgaagcccagaaaaatcctgagcaacatcaggatctggtggtacgcgttgcgggctatagcgcccagtgggtagttttagcgaaagaagttcaggacgacataatcagccgtactgagcaacaactgtcgtaaataccagacgggctatgtatcaatatatagcccgttactttctccacgacttctggttgttacttttatctgaaaaggtaattcatctggtaaatatagagtgatgttatgaataaagttgagtacgaaaccgaaggcgtcatatttaatattcaacgctattctttgcatgatggtccaggcattcgaaccattcctttttttaaaggctgcccgctgtcctgcaaatggtgtagtaatcctgaatcacaacgtcacagcccagagttattatttaaaaagaatgattgcatccgctgtggaaaatgtattgatgcttgcccacaacaggctctttccactactaatgcctggtttatcaatcgcgaccgctgtattcagtgtgggaaatgtactgagatttgccctacccgtgcgctggaaatgaagggcaagcgtatgtcggtaacggcagtgatgcgcgaactggaaaaagaagagaatttataccggcgttcaggcggcgggattaccctgtccggtggtgaaccgctggcgcagccggaatttgcccgcgagctgcttaaagcctgtaaagccaaaggctggcacaccgctattgaaacaagcggcttcaccaccaaagcggtgattgatgaggtatttccctatgtcgatcttgctctgaccgatattaaagccatcgatccggaaatccatgagcgcaacaccggcgtgaataacagagtgattctggagaatctgctgcgcatctcctttttaaccaaagtggttgtgcgtattcctgtgatcccaggagtgaatgacaattcgcaggaaatccataatattgcggagttcgcccgcctgatgcagaacgtcgataccattcacttattgccttatcacagcttcggtgaaaataaatataatctgcttggtcgccagtatccgatgggcgatacaaaaagtatcgaagaatcccaaatggcagagttaaaagcaatggttgaatccttaggttttaactgccatatcggcggttaataaaagatgtaataagagtgcgaaaaaatgctgcgcttgtttatttgttacgcatgaatactatttcaattttaaaaatatagagcaatctgcattacttatattgtcatttgatttaattacagaggtaagctagatgaatagcttagatattgtagttgccttcggcggcggcatatttggtgcggctgttggcgcgctggcggcgtttgaattcgttgggcttctggttatcgccatgacggtagtgcaaattattaccggagcatcatcggactttattacttttccgtttggactgtttggcccgcacaccggcggctttgccgctggggttgcggcgacggcgtatgcagcgaagaaaggcaagctgggttccgggcgtgatatcactgccgggttgagcggtctggcggcttacgatgtgctgctggtaggcggggtttttggggcggttggttacatcatcgcctgggggttgaaccagattccggccttcccgtccggcaatgcttggaccgataccgtggcactaaccgtggtgatttctggcgtggtctcgcgtctggttttcggtaaaactggcctgtttggaaaaccggagcagggaattcgtcactgctatccgccgcaggataagtgctggataccttaccatagccgcattccgcagctttccgtgctgggcttgggtattggcttgatggcaggctttttaggcctgaagtttggcggcaacggcgcgctgctggcgtttggtatttccgcgttctcactgattttcctgcatttcaatactcaggtaccggtgtcacatcatatttcgctgcctgccgcgttggtagcggtgccatcaggtagcctgatttgggctgctatcgttggcataatttgcgcgatattgggtgaactgatgtcgcgtatcttcctgatccacggcgatacacatattgacccgccggcgatggtcatcaccattatgaccacgatgattaatctgttggcgaccattggattatttaccttggttcccctgttttaatcccgccataacaaaaagccagcagtgtctgcctgctggctttttgttatgtgcgccgtgactggcgctgttcttcaactgtggtggcagaagaacgactaagaggtgaaagtcctccacacacccggtgaggggaagtgttagcggaaggcaagggtgttcatcgcgaggtgaaatctgaaggaagctggatgcaaaatgctggcctgacgaacaggaagcggttaaggcggcgcagcagggtaaggtggcactaatcaccaaagcccgatactcacacggaacgctgtgacgtaaagccgacaggcataagcaggaaagtcgcgtgaattaccccgggagatctgtcgccctgccagtgtgctaccggcgccgtgaggcgccgggatggggcggcagaagtcagccgacgccgtagtagtgctgcaaaaccggcagcatgaagggccgaacatgattaactgtgattaggacatccgaacccgatgatgattaatgaagcacaagcgcaggcaactgcgaccagcggcagaggagacggacagtatccgtcagggctgcatgatggcgctgaaatcagcacggcggcgggtgggcaaacgaaagcggaagtgccgctgacgatggaagcggtgataacgagagaaaacctgatgctggcttatcagcgcgtggtggaaaacaaaggcacggcgggggtggataacctcagcgtggcggagttgaaaccgtggctgaagaagaactggcgcagcgtcaggcaggcattgattgacggaaactaccagccgcggcaatacgccggatggatatcccgaagcccggatggcggcgtgagaacctcaggcatcccgacggtggtggacaggcttatccagcaggcggtgcaacaggcacagcgttacatacgggtggcaaacggtgggtggtggatatggatctggagaagttcttcgaccgggtggatcacagactcctgatgacgcgtctggccagacgtaaggacaggcgggtgctgtgactgatacgccgctacctgaaagcggaaatggttaaagacgggcaaagggagaaacggcaggcgggcatgctgcagggcggcccactgtcgccgttactgtcgaacatcctgctggatgaactggataaagaactggagcgtcgtggacacagcttctgccgctacgcagacgactgcaacatctacgtaagcagccggaaagcgggcgaccatctgctgaagaacatcagggcgttcgtggagaacaaactgaaggtgaatgagaagaagagcgcggtggcgcgcccgtgggatcggaagttcctcgggtacagtgtgacatggcacaaacaggcgaagctgaagatagccctgacgagcgtgaacaggctgaaggagaaagtccacagtctgacgacgggaaaccggagcaaatcagtgaaagcgacaatcaatgctctgacaccagtgctgtgtggatggataagctacttcaggctgacggaagtcagaggagtgctggaggagctggatggctggatcaaacggaaactgcgttgcttgttgtagcggcagtggaagagaccgctaacccgggcaaagaacctgcaaagagcaggactgagtaaggacagggcaatgatctctgcgtacaacaaccacgggccatggtggaactcagggtcaagccatatgaatcaggcgataaagaatacatggttcaggaggcagggtctgatatcactgctggaacagtagaggcagttccagagttaacatgaaccgccgtatgcggaaccgcacgtacggtggtgtgagaggacggcgggagtgatcccgcctcctactcgatcaattttaaaacacctcctatgtaggtggtgatcgttcatgtggggctttctgacagactgcctcgtcattccattcgtatcgccagtaactggcgtttgtattgtggcagttctggtatacgtttccctgtgtatctgcactggttcagcaaggtttgaaaaggagtatcccttgcaaataaccgaagcattactttcagagccggagctgtttttgttgctgtgatccatttcaattttttcgcgacaaattatttataaatatatgattatgtttttaaaaatgcaggctgaaagtatgaagaataaatacaaattaaatgagtttttggatgtaaaacgccttcagaccctgcaggacaacttttcaaaatcaatgatgatcgcgctcgtggttgtggatgagaatggtatcccggtcactaagcccagcggtttttcagacttctgcatgcgttcgcgtctcaacccgacactggcgcaccactgttatgaaagcgacaacgctggtggccgtgccgcgatgcacgctcgcaaaccggtggtttatcgctgccactgcggttttgtcgaattcgctgtcccaatcatgattaacgatcattatctcggtgcttttatttccggtcaggtaaaagtcgaagaagagaaagaacagagcatttcctatattctgaataataatgacgtctggaaagataatccttggttaattaatttgcaccagaatacacgtcgcatgccgtataagcgttttgagtctactgcctcgacgttactacacgtatcgtcttatctggtcgaacaagcgcacaccaataatatccaacgcgaacttcgtaaaaaggatcttgcactggctaatgagttaagaaaacgtgtagagatagaacgctcactacatgaagctgaatttaaagcgctctcttatcagataaatccacactttttatttaacgtattaaataccattggccggttagcttttcttgaagatgcacagcgtaccgaaacaatggtgcacgatttctctgacatgatgcgctatttgttacgtaaaaatagtcacggcctgattactctgcgtaatgaaataaattacgtcaacaactatatgtcgatccaaaaagtgcgtatgagagaccgtttcgattacctgtgcgatatcccggaaaaatatctggatgtagtctgcccgtttttgatcctgcaaccgctggtggaaaacttctttaactacgtagtggagccaagggatagcaatagtcatctgctgatccgtgccacggacgatggcctgaacgtgattattgaagtcactgacaatggcgacggcatcgcaccagataccattaatcgcattttatcaggcgaccaaaaattgcaaaaaggcagtattggcattaacaacataaaaaatagattgaagttgttatttggcgagagctatggcttggaaataatgagccctaacaaacccaggatgggtacaaccattaaacttcggttcccaatgcaggaagcctgatacaggaaaaggacatatgtttaccattgttatcgttgaagatgagcccatcgaattagaatccctgcggcagattatctcccagtgtgtggaaaacgctgcgatccatgaagcctcaaccggtaaaaaagcgattcacttaattgaccaactgagtcaaatcgatatgatcttagtggacattaatattccgttgccgaacggtaaacaggtgattgaatatctgaagaaaaaaaacagcgatactaaaatcatcgtaatcacggccaatgatgactttgatatagtacgcagcatgtacaaccttaaagtggatgattatctgctcaaaccagtgaaaaaatgtatcttgaccgacaccatcaaaaaaaccctagcattcgacgaaggagaaaatgaaaaatcccgcgccctaaaacagaaagtgttcgccatgatagacgattgcgattacacccagtggcacaactttatttttgacacgctcaacggtgcctgtccggtggatatgatagaagaggataagcgcaaagacgtgatcgattttctggaaatagttagccagtatatgaccgccaaaggggaaaagttaatgccgactaaccgtaaagtcgccgcgctgatcaaagacatcaaccagtatggcatgatggaaagccgctatttccgcatcatgatcagcctgctgaccattagcgaagagctgtttgattacgcattaaaaggctatacaggcaatatcgattttatcgaacgagcgaaattccatattgagaaaaatattctcagaaacttgacgctcgatgacgtggcagcaaaatcgtttgtcagtgcctgctatttgagccgtacctttaagaaaattaccgggttcgggttttcgaactatattgccacgcgtaaaattactatcgccaaatcgttattgcggttcagtgacttacaagtaaataccattgcgctggaactggcataccaggattcaaactatttttgccgcatcttcaaaaaagatactggcatgaccccctctgattatcgaaaagtcgtgtccccgggaattacacggtgatggcgtgattttgcattggcccgataatgaaagcaaaatagtccaacacgcccgcaagatagtttacgcccacttgtcaggttcctatcctaagataggaataaacttcccaaacaagtgggctcgctttgaacgattacctgtttacctccgaatccgttgccgaagggcatcccgataaaatggcggaccaaatttctgatgccattttggatgcgatactcctacaggacccgtggggtaaggttgcctgtgaatgcttggtgaaaactggtgccactattgttgccggagaaatatctacccatgccgccgtggatattgagaagattgtccgcaacaccataaaagagattggttacgaccattcgcgattggggtttgatggcaatacctgctgtgtattaaatatccttggcaaacagtccgccaatattgctgacggcattcgcggccactcgatggaagaactgggggcgggcgatcagggcatcaccttcggttacgcctgtgatgaaacgtcggaactgatgcccgccacgctggtatacgcccatcgtctgatggagcgccaggcgcagttgcgtaaatcccaacggttaccatttttactccctgatgccaaaagccaggttaccctgcgctatcaggataatcgtgttcattcagtagataccgttgtggtgtctacccaacacagccctgacgtttctctggacgcgctacgggaagcggtcatcgaagaaattgttaaacctgtgatgccttcgcactggctcacaccacaaacccgctttctggtgaaccctgcaggcagttttgtgattggcgggccggtgggtgactgcgggctaacggggcgtaaaattattgttgatacctatggcggcgcggcttgccatggcggcggcgcgttttcaggcaaagatccgtcgaaagtcgatcgttccgccgcctacgctgctcgctatgtggcgaaaaacatcgtcgccgctgggcttgcctcacgctgtgaagtccagttgggatgggccatcggcctgccccgccctgtttccgtcaggattaacaccttcggtacacaaacagtgtcatctgaagcgttgctgagaggcgttaacagccatttcgatcttagcgtgttcggcatcattactacgcttgatctgctggtcccccgctatcgtaaaacagcctgctatggtcactttggtcgcgacagctttccgtgggaagttacggacaaagcggcgctattatacgaagacgttggacgttaagccgacgacgcgcagcacagttgaatttattacaggagaaatttatgtctgggaaaagtttaggcttaatcgaaaccgtcgggatgtctgcggcggtagaagccgccgatgccgcaatgaaatccgctaacgttagtctggtaggctatgaattgacgaaaggcggcgggatggtgaccgtgaagctggaaggggaagtgggcgcaattaacgcggcggtagcggcagccatcagcgcggcaagccgggttggcgaggtgtatgcccataaggtgatcgcccgcaccgcgcagcatatcgagcagattattcactctaaagtgaccgccggcgtcgcagaacctcaacctgaagtgcctgctgcacaaccgacactgcaggctgaaaacgcgccttcacagacattcccggtggttaaccttgatacgtcaatcagcgcatcctgtatggatgtcactgatgaaacgctgaagtccgtggagcagcatcaaccggttaaaccctcaatagaaaacactaaacctacaaaatctgatgtaccgcaggaggcagcaaagaaaggtcctcgttccagcggcaagaaaaaataagtaaattgctatgacgctgccgcggtaacaatttctttatcgcggcatttttttgcttaacagataaagtaaaaaaccatctgcatagcgggcggctttgacacggccccctgaaagggggcttaaacactaccctttcaggcccagttgtatttgtctttcttcttcctcttttgctaccttgttcgaaaagggacgctcgtcctcgcccactgttctgtatgcatacctgctcccactgcaaattatattgctgggctatgttaacaagcctatatgctattaaaaactcatgagcaacatattgataatatcattcttatatatccacgcttaagtaaataacgcttacataactaactattccatctcacttcttccttagcgagttttcggtatgcaataggagctataccaaagcggcgagtaaatgcccttgtaaatgtctgctgaaaatcaaactgatatttaaaagtgatagtcgtgaccgattcagtagtagaacgtagttcttctgctgcatttattaatatacctaccaatagaaataccaatgatatgtttaaacaatctctgtaaataccattttgaatatccagctttttttgcctcaatatttattgagagttctacctcaagattttcatcaatccatttagcaagctcattgatatcagcgctgttttttatagtagcgttcatttttatcgatgcctgtgaaggttgattgggtcaactccagtactatgcaaccctctctgaaaagggatttattatcaggttgcagaatgcaacttcgcccccccccccgtaaacaaagaaaaaagcaggaacgccagagtctcactacgaatttccgaacatatttctctatataacttacctttttcgaaaatataacatagtaatttcacaaaattattgacatccaccattttttgtaagaaatttattcttatatcatccggacattcttcacaaaaaaacacaatataaattacattccgtaagtgtacattatattgtaatttaatcaggctacgtgataagcaacgatacatcgctttaaccggttcagaaactctcccatttttgatggctgtaagctcatcaaataatgatagtggtacccgctcgatgacttgtcgcagaagatcttttttttcgttgaaataccagtatatggccccccgagtacaacctgcgcgcgccgcaatcatctccagtgtcgtctttgaaaagcccgtctcacaaaagcagaactctgccacatccaggatttgtttgcgggtttcttccgctgcaaattttgtgtgccgcaccactgttgaaatctccattgacatcttatttcaggaaatatctctggggcatttagtaccaacccaacagccatttactcaggcgcagtatgttgtttactgcacctgaatatttactcatgcttatgattgctcagcttcagtcttatccgatgatttcttatttctgcggctgaagaacccggcaattaacatatagaagagaggaatataaaagattgccagtatcgtagcagtgatcatccctccaaccacaccagtaccgatggcatgtttacttccggaacttgctccagtcgagacagccagtgggataacccccattacaaatgccagcgaagtcataattatcggtcttaacctcactctcgccgcttcaacagcagcctctttaatgcttagtccttctttctcatgcaattcacgagcaaactccacgataagtatggcatttttcgcagacagccctattgttgttaataaaccgacctggaaaaagacatcgttaccaaggccgcgcaacaaagtagcacagacagcccccaggacaccaagcggaacaaccagcatgaccgagaaaggaatgctccagctttcatacagtgcagccagacacagaaagacgatcaacagtgaaagtgcatatagtgcaggagcctgagaacctgaaagtcgttcctcaaaagacaaacctgtccaggaaatatggaaaccttcgggaagtcttgccgcaatatcctcaattgctttcattgcatccccggaactgtatcctggtgccggttcccccaggatttcgacagcagagataccattatattgctccagttttggtgagccataaatccatttgcctgttgcaaaagaggcaaaggaaaccatgtcgccatcactgttacggacataccatttatcaaaatcctgcggtgatatacgtgagccgggttcgccctgaatatagacttttttcacccgtccacgatcgttaaaatcatttacatacatcgaaccccaggctgctgacattatgttgtcgacgtcgctcatgctcagtttaaacgcctgaactttctcgtcatcaatcagaatctggaactgaggctcatcgttcatgccgttaggacgaaccatgtttaacgctggacttttcgccgcttcagcaagaagctgatttcgggcctggatcattttttcatggctagctccgctacgatcctcgaggaacaggtcaaaccctgtagcattccccagttctgatacggcagggggcgctttaaaactaga

SEQ ID NO: 994 - DNA, 441 bp, Escherichia coli
ctgacagaattacccccggcatataacctgcagcgcagtgcgcagttgctgcagcaactgatggtacttttccccgacaatccccatgttcaggaaatggtggataactggcagaagagcgtaaggagtcgtgcgctcccggaagaggcgatgacgggctggaatgaaggcatgacccgcttacagcagctggctgaacgcctgaaccgtctggatgaacagcggggaaaatacatgacggtcagtgaactgagaacggaggtgtttggcatcatgcaggcttttaaccggcatatcccggcggaagagcagttacgtcgctatgatgaagcccgtaaccagaatggcagtgaacagcagcaaaaacaggctgaaatggtactgaatcagctgattaatcgttatcaggtggaacacgctggcaaaccggagaggcagcca

SEQ ID NO: 995 - protein, 147 aa, Escherichia coli
LTELPPAYNLQRSAQLLQQLMVLFPDNPHVQEMVDNWQKSVRSRALPEEAMTGWNEGMTRLQQLAERLNRLDEQRGKYMTVSELRTEVFGIMQAFNRHIPAEEQLRRYDEARNQNGSEQQQKQAEMVLNQLINRYQVEHAGKPERQP

SEQ ID NO: 996 - DNA, 435 bp, Escherichia coli
ttgactggaaaattatgttgcaggaacgtgagggctgaggaacaaagcgtattccggcgctgtccgtccttgctgtcactgacactgatgtctgctttattatcgcctttatctcttcaggcagcggatgtccggcgtagcggagatgaagcatttatcattcagcagcagcgtcaggaagcccttgagcaacaactgatgccttcagcccctgatgttcgcctttctgcacctggctcttttgcacgtaagattaattttcctgttgaaacgccctgttttcagattaaacagacggaactggagggggctgatgcgttaccacactggctgcctttacaaaaaatcgccaacggggcggtcgggcactgtctgggggcgaaaggaattaatctgctgatgagtacattgcagaaccgtctggtcgatcatggt

SEQ ID NO: 997 - protein, 145 aa, Escherichia coli
LTGKLCCRNVRAEEQSVFRRCPSLLSLTLMSALLSPLSLQAADVRRSGDEAFIIQQQRQEALEQQLMPSAPDVRLSAPGSFARKINFPVETPCFQIKQTELEGADALPHWLPLQKIANGAVGHCLGAKGINLLMSTLQNRLVDHG

SEQ ID NO: 998 - DNA, 357 bp, Escherichia coli
ctgcttacccggacaccacaactgattgctgtgctgcgtgaagaatgggacatcagccagaaaaatgtggtgttcaacgataaacgctttggctgcgtgtacagcctgaaggccagtctttccagtgtgccggatacataccggtatcatctgtctcaccgtattcgtcgcgtggttgggaatgaaaacacatcattgccatatcagcaggttgcccgggaagtgaaagcgccccgtgaacggctgaagtatgcgctggaggcggggttactggtgaccgcactggaccggcctgttctggtctgcagtcagcgtattgcggctgatgtcctgagactaagacagaggtgccggtgg

SEQ ID NO: 999 - protein, 120 aa, Escherichia coli
  MISC_FEATURE (116)..(116): unknown
LLTRTPQLIAVLREEWDISQKNVVFNDKRFGCVYSLKASLSSVPDTYRYHLSHRIRRVVGNENTSLPYQQVAREVKAPRERLKYALEAGLLVTALDRPVLVCSQRIAADVLRLRQXECRW

SEQ ID NO: 1000 - DNA, 1008 bp, Escherichia coli
atgatgtcatcaggtaaaactcgttatttaataagccatatgcctgaggcatcggtatgcattttcggcgaggttactccggatccagatattgatattctgacttccggcgcggcgcgttttaaagcctttaagcccgacgttattatcgccctcggcggcggctcgtcgctggacgctgcgaaaggaattaaagtcacattggaagagtattttggagatcatcaaatcgatctcattgctattcccacaaccagcggatccggctctgaagtgacgtcctacgcgatcatctctgatccgcaaaatggccgcaaatatccgttgatctccgggcaactggtgccggaaatcgccattctcgatcctaacctagtgttaaccgcgccgcgtcatgtcgcggtagataccggcatggacgtgctgacccatgccattgaagcctttgtctctactggctcaaatgactttagcgatgcgctggcggaaaaagccatcgcgttgacctggcgctatctgccgcaggtgtttaacgacgaaaaagacattgcggcgcgcacccacatgcacaatgcctcctgtatggcaggcatggcatttaactccgccgggctggggttggttcacggcatggcacacgccatcggcgggatgctgcatattcctcatggcaaaattaacgccatgctgctgccgattgtcatcgacttcaacagcaaacgggccagcactgaaacccgcgatcgctatcaccgttgcgcgcaaatcataggcattgaccatgcggtaccggagcaggccatcgcgctgatgactcaggagatccgccagatcaatcgccatttctgcatccccgtcactctcagcgaactgggcatcgaccgtgcaaaaatcatcgagttgcgcagcgcactggtgaattcgacgctggccgacggttgtaccgcgtcgaacccgcggcaggtgacgacgcatgatgtcgaagggttgatcgacctgattaccggc

SEQ ID NO: 1001 - protein, 336 aa, Escherichia coli
MMSSGKTRYLISHMPEASVCIFGEVTPDPDIDILTSGAARFKAFKPDVIIALGGGSSLDAAKGIKVTLEEYFGDHQIDLIAIPTTSGSGSEVTSYAIISDPQNGRKYPLISGQLVPEIAILDPNLVLTAPRHVAVDTGMDVLTHAIEAFVSTGSNDFSDALAEKAIALTWRYLPQVFNDEKDIAARTHMHNASCMAGMAFNSAGLGLVHGMAHAIGGMLHIPHGKINAMLLPIVIDFNSKRASTETRDRYHRCAQIIGIDHAVPEQAIALMTQEIRQINRHFCIPVTLSELGIDRAKIIELRSALVNSTLADGCTASNPRQVTTHDVEGLIDLITG

SEQ ID NO: 1002 - DNA, 684 bp, Escherichia coli
atgaattacaccgaacaacaagccgagtggattacccaacaaattttgcaggaacttgccaccagtaaaaaaacggcagcgcctgctgccgcgcccgtcgcgctgaatattccggtgggcgtgtccaaccgccatgttcatctgtgccgtgaagatatggacattctgtttggctacggctctacgctaacccgttctaaagcgttgaaacagcccggtcagtatgccgccgaagagatggtgacgctgcgcgggccaaaaggcgagctcaacaaagtgcgcgtgttagggccactgcgtaatgccacgcaggtggaaatctctgtggccgacggctttgcgctgggcactaaagctccggtgcgcatgtcgggggatctgctggattcgccgggcattgaaatcatcggtccgaaagggcgggtggtgaaacacaacggcatgattgtcgcctggcgccatatccatatctcgcccgaagaagccgaactgcacggcctgcatgacggaatggaaatcgatgtgcaaacaaacggtccgcgcggtggtgtgctcagccatgtagtggtacgcgtcacggcggatgcagtgctggaactgcatattgatatggaagaagctaacggcgtcggtctgcgtaatggcgataccgttcgcggcataaaacaggctgcgcgccatggc

SEQ ID NO: 1003 - protein, 228 aa, Escherichia coli
MNYTEQQAEWITQQILQELATSKKTAAPAAAPVALNIPVGVSNRHVHLCREDMDILFGYGSTLTRSKALKQPGQYAAEEMVTLRGPKGELNKVRVLGPLRNATQVEISVADGFALGTKAPVRMSGDLLDSPGIEIIGPKGRVVKHNGMIVAWRHIHISPEEAELHGLHDGMEIDVQTNGPRGGVLSHVVVRVTADAVLELHIDMEEANGVGLRNGDTVRGIKQAARHG

SEQ ID NO: 1004 - DNA, 756 bp, Escherichia coli
atgtcggccctactccggcgcgttgaaggtgggggggatctcggtaccgccaatatcgcaatcgtggtgctggatgaagataaccagccggtggcaggggtaatgtatccctccaatgtggtgaaagacggcgtggtggtggattacctgaccgccagccgggtagtagcacgtctcaaacaaattcttgaacagaaacagggctgcacgctggagcgcgcggcgatcgcagtcccaccggggatctctgaaggcaacacaaaagtgatcgtcaacgtagtggagttggcgggttttatcgtgacccaagtactagatgaaccggtagccgctgccagcgcgctgaatattaaaaacggggcggtggtggatgtcggaggaggcaccaccggcatgagcattttgaaaagcggtaaagtgacgttcagtgccgatgagcccaccggtggaagccatatgaagttggtgatcgctggcgcgctgggcttgccttatgccgaggcggaagaaatgaaaaaaaacgggcaggaagcgcaggtctttaccctggtgctaccggtggcccagaaaatggccagcttggtgtcgggatggttcgctacccagcaggtaaaaaatatttatttggtaggtggcgcgagcagcttcagccagtttgccaacgtgttcagtaaacaaaccggtaaaaatgtgattccttcggcagagccactattggtcacaccattaggcatcgccatgaatgcggaccagggg

SEQ ID NO: 1005 - protein, 252 aa, Escherichia coli
MSALLRRVEGGGDLGTANIAIVVLDEDNQPVAGVMYPSNVVKDGVVVDYLTASRVVARLKQILEQKQGCTLERAAIAVPPGISEGNTKVIVNVVELAGFIVTQVLDEPVAAASALNIKNGAVVDVGGGTTGMSILKSGKVTFSADEPTGGSHMKLVIAGALGLPYAEAEEMKKNGQEAQVFTLVLPVAQKMASLVSGWFATQQVKNIYLVGGASSFSQFANVFSKQTGKNVIPSAEPLLVTPLGIAMNADQG

SEQ ID NO: 1006 - DNA, 702 bp, Escherichia coli
atggacaatcaaaccttatcgcaactgctggaccgggtcatcgctgaagtgttggcacaatccgtcgcgcagaaaaatgtctgcgtagtggtgactggtgaggatatctcctcgctgccggaaacgctgaactgccttgaggcgcttgagctggcgggttatcagttgtgggtaaatttttctcacagcgccagccagtcggcgctgaaatctgtctgcatggatgcgctaattcagcgtggttctcgtgctggatttgacagatcgccgcctcactatgaggtgctctatctgcctgcgctctctgtcaacagcatgagcaaaattgcgctgggcattcgcgataatctggcctgtgaaactgtatttcaggcgttacagcaccgtaaacagattatcgccacgctgcatcaacaatgcgtcgatagcgaattaccgatgccactgctgtcttgtctggaaggttacgctcaggtcctagagagctatggcattacgcttttcggtaaacgtgcagcccatgtcaagtcggtgcaaggaagccaatccaccctgacagtagccggtaaaaaacgtttaatcacccagagcgatatccgcctactgaccattggcacagtgctgcgcattgagagcgacacgctgattacccctgctgccagagatgaaatccagcggcgtaatctcactgttatccatggt

SEQ ID NO: 1007 - protein, 234 aa, Escherichia coli
MDNQTLSQLLDRVIAEVLAQSVAQKNVCVVVTGEDISSLPETLNCLEALELAGYQLWVNFSHSASQSALKSVCMDALIQRGSRAGFDRSPPHYEVLYLPALSVNSMSKIALGIRDNLACETVFQALQHRKQIIATLHQQCVDSELPMPLLSCLEGYAQVLESYGITLFGKRAAHVKSVQGSQSTLTVAGKKRLITQSDIRLLTIGTVLRIESDTLITPAARDEIQRRNLTVIHG

SEQ ID NO: 1008 - DNA, 267 bp, Escherichia coli
atgtacctcgctaaagttactggcgcattggtttccaccaccaaacacgcctcgctgaatggctcaaaactgctgatagtggcgcggctcgatgaaaactatcagccgactgtccatgcccaggtggcagttgatactgtcggcgcgggcaatggagagattgtgatcatcaccaccggcagttcggcgcgtatgagcaacaacaaagatcactcggtgattgacgctgccgtggtgggtatcgtcgactcgctcgaacttaacggt

SEQ ID NO: 1009 - protein, 89 aa, Escherichia coli
MYLAKVTGALVSTTKHASLNGSKLLIVARLDENYQPTVHAQVAVDTVGAGNGEIVIITTGSSARMSNNKDHSVIDAAVVGIVDSLELNG

SEQ ID NO: 1010 - DNA, 495 bp, Escherichia coli
atgtctgcgaatgaggcttcactcgacaactggattaacgaggctattgccacgcagttaccggaactccggatgtcgctgagcctggaggacagtgaactgctggcaaagttggtccgggaaatggcacagtccagcaatgtatcgatcgtttttagcctagtggatgcctgcggtcagcagcgttttttcttcagcatggataacgccctgctggtcagccataccttggcaccacaaaaggcctggaccgcggtagctctcaaaatgccaactcacgaactggcaacgctggtacagccgggtggtgatttgtacggccttgagaaagaaaaagatatctgctgcttcggcggtggttttccctgctggtcgggcaggcgcttactaggcggcatcggcatcagcggcggcagtgttgaggaagatatgctcatcgcccgccaggcgatggcgcagtttagcgttctgcgttatcccctcacaacaacccgt

SEQ ID NO: 1011 - protein, 165 aa, Escherichia coli
MSANEASLDNWINEAIATQLPELRMSLSLEDSELLAKLVREMAQSSNVSIVFSLVDACGQQRFFFSMDNALLVSHTLAPQKAWTAVALKMPTHELATLVQPGGDLYGLEKEKDICCFGGGFPCWSGRRLLGGIGISGGSVEEDMLIARQAMAQFSVLRYPLTTTR

SEQ ID NO: 1012 - DNA, 1194 bp, Escherichia coli
atgtctttagcttgtgtattagtgattaattgtggttcctcatcaatgaaattctccgtcattcctcaggatgcagatcagccgttgctgtcgggcctagcggaacgactgggtattgatcatgctgtcataacgtttaaagaccgagacggccataaatccactgtcgcgctggatgacgccagccatcagcatgcgctcaaagtgctcttcgcgaagctcgacgaacagcaactgttggaagccatcaacgccgttgggcaccgcgtggctcatggcggcagcgacttcaaaagatcagtactggttaccgatgatgtgatcgaaaaagtccgcgcgctgtcggtgctggcccctttgcataaccctgccaacctgattggtattgaagcggctcgggctctgttgcccgcgttgccgcatattgcggtgttcgatactgcgttccaccagaccttgtctccggctgcttacacctatgcgatcccgctggagttccagcaagattatatggtgcgacgttacggctttcacggaacatctcaccgctatattgccgccgaggcgcttgcatcactagatctcgacccggcggatcatggcatcgtgattgcccacttgggcaacggttcatcgctatgtgcggtgcaaaacggcacgagcattgacacctcaatgggtatgaccccgctggaagggctggtaatgggcacgcgctgcggggatcttgattttggtgtcgtcgcatatctggcgaaacgcacaggtcaaacgttcgacacgctgtacaaaatgctcaataaccagtccggcctaatggggatttccggcttatccagcgattgccgcacccttcagcaggcgcgtgatgagggccacgaacgggcagcgttagccatcgacgtgttagtacatcgtctcgcacgacatatcggcggccacgtgacctcgcttaaacgcttcgatgcgctgattttcaccggtggaattggcgaaaactcggcgttaattcgagaacttaccgtgcaacgccttcaggcgctgggattggaactggataaagaacgtaaccagcagctgttcggcggacgtagcggactgatttctaaaaccgacaccacgaagattgcggtcatcccaaccaatgaagaaaaaatgattgctatagatgcagcggagattgcccgcacggca

SEQ ID NO: 1013 - protein, 435 aa, Escherichia coli
VLRKICSSPARRWRSLAFCVIPSQQPVNFLQSISGGIMSLACVLVINCGSSSMKFSVIPQDADQPLLSGLAERLGIDHAVITFKDRDGHKSTVALDDASHQHALKVLFAKLDEQQLLEAINAVGHRVAHGGSDFKRSVLVTDDVIEKVRALSVLAPLHNPANLIGIEAARALLPALPHIAVFDTAFHQTLSPAAYTYAIPLEFQQDYMVRRYGFHGTSHRYIAAEALASLDLDPADHGIVIAHLGNGSSLCAVQNGTSIDTSMGMTPLEGLVMGTRCGDLDFGVVAYLAKRTGQTFDTLYKMLNNQSGLMGISGLSSDCRTLQQARDEGHERAALAIDVLVHRLARHIGGHVTSLKRFDALIFTGGIGENSALIRELTVQRLQALGLELDKERNQQLFGGRSGLISKTDTTKIAVIPTNEEKMIAIDAAEIARTA

SEQ ID NO: 1014 - DNA, 691 bp, Escherichia coli
ttgcggtattacaggaatttagtcggcactgcgttgggccacactatcggcctagtgattgccaatgttgataatcaattgcatgaagtcatgaatatcgacaagaaatatcgctctatcggtattcttggcgcacgtactggcgcaggcccgcaaatttttgcggctgacgaagcgattaaagcaaccaacagcgaaattatttctattgagctggcccgcgataccgaaggaggtggcggacacggttgcttaattatttttggtgcgtctgatgtttccgacgtcaggcgtgcggttgaagtggcgctgtctgaaattgaacgcaccatgggtgacgtttatggctcgtcagccggacatcttgaattccagtacaccgctcgtgccagctacgcgctgaataaagcgctgggtgcgccgattggtaaatccttcgggatgacctgtgcctcgcctgcggcgattggcctagtgattgccgacgctgcggcgaaatccgccgtgattgacccggtgggttatgccagcccgtcgcaaggcaccagctttagtaacgaagtgatcttcaccttctccggtgattccggtgcagtacgtcaggcggtgattgccgcgcgtgaagtcggtctacaactgctctccacgttagatccggtggaaattaaatccaccacgacgccatatatct

SEQ ID NO: 1015 - protein, 230 aa, Escherichia coli
LRYYRNLVGTALGHTIGLVIANVDNQLHEVMNIDKKYRSIGILGARTGAGPQIFAADEAIKATNSEIISIELARDTEGGGGHGCLIIFGASDVSDVRRAVEVALSEIERTMGDVYGSSAGHLEFQYTARASYALNKALGAPIGKSFGMTCASPAAIGLVIADAAAKSAVIDPVGYASPSQGTSFSNEVIFTFSGDSGAVRQAVIAAREVGLQLLSTLDPVEIKSTTTPYI

SEQ ID NO: 1016 - DNA, 1511 bp, Escherichia coli
atgaatgatattgaaatcgctcaggctgtctcgaccatcctgagcaaattcaccaaagcaacaccggatgaagctcccgccacgtcagaagcagcgcgggtcgacgggttggatgaaattgtcgctaaggcgttggcgcagcactcttccgtgcgcgacgccagtgcgatctctcaggtagcgaaggtagcgaatgctagcactggagcattcgataccatggatgaggcgatttccgccgccgtcttggcacaggtgcagtatcgccactgttctatgcaagaccgcgcctcgtttatcaatggcattcgcgatgtcttcctgcaggaagatgtgctgtgtgccctttcccgtatggcggtggaagagaccggcatggggaattacgaggacaaactgatcaaaaaccgcgtcgcagcgctgaaaacgccaggtatcgaagatctgaccaccagcgcggtttccggagacgggggtttaacgttgatcgaatactctgcgttcggagtgattggttcgattacaccaacgactaacccgaccgaaaccattatcaacaacagcataggcatgctggcggcaggcaacactgtggtgttcagtccacatccgcgctcgcgcaaagtgtcgctgtacgcggttgagctgatcaacaacaagcttgcccagttgggcgcaccggcgaacatggtggtaacggtgaccaaaccgtccatcgacaataccaacgtcctgatcaacgacccacgtatcaacatgctggtagcgactggcggtccagccatcgtgaaaaccgtgatgtcatcaggtaaaaaagcgattggtgcaggcgcaggtaacccgccagctgtggtagatgaaacggcggatatcgaaaaagcagcccgcgacatcattaagggctgtagcttcgacaacaacctgccgtgcgtggcggaaaaagaggtgattgttgtgaaccaggtagcggactatctgattcactgcatgaagaaaagcggtgcctatctgttgtgcgataagaagttaagtcaacaactgcaatcgttggtgcttaatgaaaaaggcactgggccgaataccgcctttgtcggcaaagatgcgcgctatatcctgcaacaactgggaatccaggttggcgacgatatcaaagttatcttaattgaggctgagaaaacacatccgtttgtggtgcatgagctgatgatgccggtcctgccggtggtgcgcgtagacaatgttgatgaagccattgagctggcggtgaaagtggagcacggcaatcgtcataccgcggttatgcactccaccaacgtcgaaaagctgaccaaaatggcgcgcctgatccagaccaccatctttgttaaaaatggtccctcttatgcagggcggggagcggtgaagggcatgccacctttacgattgccggaccgaccggcgagggacttacgtcagcgcgttcgtttgcacgccgtcgtcgctgtgtaatggttgaagcgctgaatattcgc

SEQ ID NO: 1017 - protein, 505 aa, Escherichia coli
  MISC_FEATURE (464)..(464): unknown
  MISC_FEATURE (466)..(466): unknown
MNDIEIAQAVSTILSKFTKATPDEAPATSEAARVDGLDEIVAKALAQHSSVRDASAISQVAKVANASTGAFDTMDEAISAAVLAQVQYRHCSMQDRASFINGIRDVFLQEDVLCALSRMAVEETGMGNYEDKLIKNRVAALKTPGIEDLTTSAVSGDGGLTLIEYSAFGVIGSITPTTNPTETIINNSIGMLAAGNTVVFSPHPRSRKVSLYAVELINNKLAQLGAPANMVVTVTKPSIDNTNVLINDPRINMLVATGGPAIVKTVMSSGKKAIGAGAGNPPAVVDETADIEKAARDIIKGCSFDNNLPCVAEKEVIVVNQVADYLIHCMKKSGAYLLCDKKLSQQLQSLVLNEKGTGPNTAFVGKDARYILQQLGIQVGDDIKVILIEAEKTHPFVVHELMMPVLPVVRVDNVDEAIELAVKVEHGNRHTAVMHSTNVEKLTKMARLIQTTIFVKNGPSYAGXGXSGEGHATFTIAGPTGEGLTSARSFARRRRCVMVEALNIR

SEQ ID NO: 1018 - DNA, 708 bp, Escherichia coli
atgtggtggtatcagaaatctttggcagttgccctcagcatatcaccacattggccatttttggcgaagtcgcggcggtgcatgaagccatgcgaatcattgaggaagacgataaccagttttgagagtccgcttatgaagaagatattacttatcacaggcgatttctctgaagactatgaagtcatggtgccatggcaggcattaaacatgttaggtttcagagtggatgtagtgtgtccgggaaaacgtaccggcgagtttattaaaaccgcgattcatgattttgaaggtgatcagacctacaccgaaaaacccggacatctttttagattaactgcatcatttgatgacataaggttacaggaatatagtggtgtttatatttctggtgggcgttcatcggaatacttgcgattaaataagtcagtattggatatcgtgcattacgcgatgaatttaacattacctgttgctgcaatttgtcatggcccacaaattctggccgctgctggggtattaaaaggccggaaactgacgggatattttacggtaaaaccggaagtggaaatggcgggtggccagtgggtcactgccgcagatgatgaagccattgtggatggtaatttaataaccgcgactacctggatggggcatccagcaatattacgtcactttattactcaaatgggcactagcattattcat

SEQ ID NO: 1019 - protein, 236 aa, Escherichia coli
MWWYQKSLAVALSISPHWPFLAKSRRCMKPCESLRKTITSFESPLMKKILLITGDFSEDYEVMVPWQALNMLGFRVDVVCPGKRTGEFIKTAIHDFEGDQTYTEKPGHLFRLTASFDDIRLQEYSGVYISGGRSSEYLRLNKSVLDIVHYAMNLTLPVAAICHGPQILAAAGVLKGRKLTGYFTVKPEVEMAGGQWVTAADDEAIVDGNLITATTWMGHPAILRHFITQMGTSIIH

SEQ ID NO: 1020 - DNA, 2550 bp, Escherichia coli
atgttagagaaaggcttttctaatccgacagaccgtgttgtaagactgagaaatatgatcctgacggcgaagccgtatgtggaatcagaacgcgcggtgttagcaaccgaagcatataaagaaacagaacaactgcccgcgattatgcgtcgtgctaaagtggtggaaaaaatctttaaccaattaccggtaacaattcgcccagacgaattaatcgttggagcggtaactattaatcctcgctcaactgaaatctgccctgagttctcctacgactgggtggaaaaagagtttgagactatggaacaccgtattgccgacccgtttgttatcccgaaaaagactgctcaggagcttcatgaagcatttaaatactggccgggtaaaactaccagtgctctggcggcatcttacatgtcagaaggcactaaagagagtatggcgagcggtgtattcactgttggtaactacttcttcgggggcgtcggtcatgtcagtgttgactacggtaaagtgctgaaaattggtttccgtggtatcattaatgaagttagccgtgccttggaatcattagatcgcactgaaccaggatatataaagaaagaacagttctataatgcggtgctgatcagttataacgcagcgatccgtttcgcccatcgttacgctgaagaagcatcccgtctggcgcagcaggagagcaatccgacccgtaaacgcgaactggagcagattgctcaaaactgtactcgcgtgccggaatacggtgctaccacattctgggaagcatgccagacattctggtttattcagagcatgttacagattgaatccagcggtcattctatctccccggggcgtttcgaccagtatatgtacccgtatctggagtcggacaaatctatctcgcgtgaattcgcgcaggaactggtggattgctgctggatcaagcttaacgacattaacaaaacgcgtgacgaagtctctgcccaggcgtttgccggttacgcagtgttccagaacctgtgctgtggcggccagacagaagacggtcgcgacgcaactaacgatctgagctacatgtgtatggaagcgactgcccatgtgcgtctgccgcagccatccttctcaatccgcgtatggcagggtactccggatgagtttctgtatcgcgcttgcgagctggtgcgtatgggcctgggcgttccggcaatgtacaacgatgaagtaatcatcccggcgctgcagaaccgtggcatttcgctgcgtgatgcgcgtgattactgtatcatcggctgcgtagagccgcaggcaccgcatcgcaccgagggctggcatgacgccgcgttctttaacgttgcaaaagtgctggaaatcaccctgaacaacggtcgcgttggcaataaacagctaggcccagtgactggcgaactgactcagttcaccagcatggaggacttctacaccgcgttccagaaacagatggcgcacttcgttcatcaactggttgaagcctgtaacagcgtggatattgcccacggcgaacgctgcccgctgccgttcctatcagcactggtcgacgactgtatcggccgtggtaaatctctccaggaaggcggggcgatttacaactttactgggccgcaagcattcggcgtagccgataccggcgactccgtctatgccatccagaaacaggtattcgaagatcgtaaactgtctttgagcgaactgaaaagcgcactggacgccaacttcggttatccggtgggtgcgaacccgcacactccagcggcgaaatcctcgctcaacgagcaggatatctacgatgtggtgaaacgcatcattgaacagcatggcgcgctggatccggcagcgattaaaaacgaagtttatcgccagctgacttccggcagtgcagcaccggtgcaatccggcactatgtcccgtcacgaggagatccgtcgtattctggaaaacacaccgtgcttcggtaacgacatcgatgacgtggatttagtagcgcgtaaatgtgcgctgatctactgccaggaagttgagaaatataccaacccgcgcggtggccagttccaggctggtatctatccggtgtctgcgaacgtgctgtttggtaaagacgttgccgcactgccggatggccgtctggcgaaagagccgttggcggatggcgtatctccacgtcagggtaaagacacccttggcccaaccgccgcagccaactcagttgccaaactggatcactttatcgcctccaacggtacgctctataatcagaaattcctgccgtcttctttggctggcgagaacggtctgcgcaacttcagcggcctgatacgtcactacttcgataagaaagggatgcacgttcaatttaacgttatcgaccgcaacactttgatcgaagcccagaaaaatcctgagcaacatcaggatctggtggtacgcgttgcgggctatagcgcccagtgggtagttttagcgaaagaagttcaggacgacataatcagccgtactgagcaacaactgtcg

SEQ ID NO: 1021 - protein, 850 aa, Escherichia coli
MLEKGFSNPTDRVVRLRNMILTAKPYVESERAVLATEAYKETEQLPAIMRRAKVVEKIFNQLPVTIRPDELIVGAVTINPRSTEICPEFSYDWVEKEFETMEHRIADPFVIPKKTAQELHEAFKYWPGKTTSALAASYMSEGTKESMASGVFTVGNYFFGGVGHVSVDYGKVLKIGFRGIINEVSRALESLDRTEPGYIKKEQFYNAVLISYNAAIRFAHRYAEEASRLAQQESNPTRKRELEQIAQNCTRVPEYGATTFWEACQTFWFIQSMLQIESSGHSISPGRFDQYMYPYLESDKSISREFAQELVDCCWIKLNDINKTRDEVSAQAFAGYAVFQNLCCGGQTEDGRDATNDLSYMCMEATAHVRLPQPSFSIRVWQGTPDEFLYRACELVRMGLGVPAMYNDEVIIPALQNRGISLRDARDYCIIGCVEPQAPHRTEGWHDAAFFNVAKVLEITLNNGRVGNKQLGPVTGELTQFTSMEDFYTAFQKQMAHFVHQLVEACNSVDIAHGERCPLPFLSALVDDCIGRGKSLQEGGAIYNFTGPQAFGVADTGDSVYAIQKQVFEDRKLSLSELKSALDANFGYPVGANPHTPAAKSSLNEQDIYDVVKRIIEQHGALDPAAIKNEVYRQLTSGSAAPVQSGTMSRHEEIRRILENTPCFGNDIDDVDLVARKCALIYCQEVEKYTNPRGGQFQAGIYPVSANVLFGKDVAALPDGRLAKEPLADGVSPRQGKDTLGPTAAANSVAKLDHFIASNGTLYNQKFLPSSLAGENGLRNFSGLIRHYFDKKGMHVQFNVIDRNTLIEAQKNPEQHQDLVVRVAGYSAQWVVLAKEVQDDIISRTEQQLS

SEQ ID NO: 1022 - DNA, 915 bp, Escherichia coli
atgaataaagttgagtacgaaaccgaaggcgtcatatttaatattcaacgctattctttgcatgatggtccaggcattcgaaccattcctttttttaaaggctgcccgctgtcctgcaaatggtgtagtaatcctgaatcacaacgtcacagcccagagttattatttaaaaagaatgattgcatccgctgtggaaaatgtattgatgcttgcccacaacaggctctttccactactaatgcctggtttatcaatcgcgaccgctgtattcagtgtgggaaatgtactgagatttgccctacccgtgcgctggaaatgaagggcaagcgtatgtcggtaacggcagtgatgcgcgaactggaaaaagaagagaatttataccggcgttcaggcggcgggattaccctgtccggtggtgaaccgctggcgcagccggaatttgcccgcgagctgcttaaagcctgtaaagccaaaggctggcacaccgctattgaaacaagcggcttcaccaccaaagcggtgattgatgaggtatttccctatgtcgatcttgctctgaccgatattaaagccatcgatccggaaatccatgagcgcaacaccggcgtgaataacagagtgattctggagaatctgctgcgcatctcctttttaaccaaagtggttgtgcgtattcctgtgatcccaggagtgaatgacaattcgcaggaaatccataatattgcggagttcgcccgcctgatgcagaacgtcgataccattcacttattgccttatcacagcttcggtgaaaataaatataatctgcttggtcgccagtatccgatgggcgatacaaaaagtatcgaagaatcccaaatggcagagttaaaagcaatggttgaatccttaggttttaactgccatatcggcggt

SEQ ID NO: 1023 - protein, 305 aa, Escherichia coli
MNKVEYETEGVIFNIQRYSLHDGPGIRTIPFFKGCPLSCKWCSNPESQRHSPELLFKKNDCIRCGKCIDACPQQALSTTNAWFINRDRCIQCGKCTEICPTRALEMKGKRMSVTAVMRELEKEENLYRRSGGGITLSGGEPLAQPEFARELLKACKAKGWHTAIETSGFTTKAVIDEVFPYVDLALTDIKAIDPEIHERNTGVNNRVILENLLRISFLTKVVVRIPVIPGVNDNSQEIHNIAEFARLMQNVDTIHLLPYHSFGENKYNLLGRQYPMGDTKSIEESQMAELKAMVESLGFNCHIGG

SEQ ID NO: 1024 - DNA, 903 bp, Escherichia coli
atgaatagcttagatattgtagttgccttcggcggcggcatatttggtgcggctgttggcgcgctggcggcgtttgaattcgttgggcttctggttatcgccatgacggtagtgcaaattattaccggagcatcatcggactttattacttttccgtttggactgtttggcccgcacaccggcggctttgccgctggggttgcggcgacggcgtatgcagcgaagaaaggcaagctgggttccgggcgtgatatcactgccgggttgagcggtctggcggcttacgatgtgctgctggtaggcggggtttttggggcggttggttacatcatcgcctgggggttgaaccagattccggccttcccgtccggcaatgcttggaccgataccgtggcactaaccgtggtgatttctggcgtggtctcgcgtctggttttcggtaaaactggcctgtttggaaaaccggagcagggaattcgtcactgctatccgccgcaggataagtgctggataccttaccatagccgcattccgcagctttccgtgctgggcttgggtattggcttgatggcaggctttttaggcctgaagtttggcggcaacggcgcgctgctggcgtttggtatttccgcgttctcactgattttcctgcatttcaatactcaggtaccggtgtcacatcatatttcgctgcctgccgcgttggtagcggtgccatcaggtagcctgatttgggctgctatcgttggcataatttgcgcgatattgggtgaactgatgtcgcgtatcttcctgatccacggcgatacacatattgacccgccggcgatggtcatcaccattatgaccacgatgattaatctgttggcgaccattggattatttaccttggttcccctgttt

SEQ ID NO: 1025 - protein, 301 aa, Escherichia coli
MNSLDIVVAFGGGIFGAAVGALAAFEFVGLLVIAMTVVQIITGASSDFITFPFGLFGPHTGGFAAGVAATAYAAKKGKLGSGRDITAGLSGLAAYDVLLVGGVFGAVGYIIAWGLNQIPAFPSGNAWTDTVALTVVISGVVSRLVFGKTGLFGKPEQGIRHCYPPQDKCWIPYHSRIPQLSVLGLGIGLMAGFLGLKFGGNGALLAFGISAFSLIFLHFNTQVPVSHHISLPAALVAVPSGSLIWAAIVGIICAILGELMSRIFLIHGDTHIDPPAMVITIMTTMINLLATIGLFTLVPLF

SEQ ID NO: 1026 - DNA, 1074 bp, Escherichia coli
atgatgattaatgaagcacaagcgcaggcaactgcgaccagcggcagaggagacggacagtatccgtcagggctgcatgatggcgctgaaatcagcacggcggcgggtgggcaaacgaaagcggaagtgccgctgacgatggaagcggtgataacgagagaaaacctgatgctggcttatcagcgcgtggtggaaaacaaaggcacggcgggggtggataacctcagcgtggcggagttgaaaccgtggctgaagaagaactggcgcagcgtcaggcaggcattgattgacggaaactaccagccgcggcaatacgccggatggatatcccgaagcccggatggcggcgtgagaacctcaggcatcccgacggtggtggacaggcttatccagcaggcggtgcaacaggcacagcgttacatacgggtggcaaacggtgggtggtggatatggatctggagaagttcttcgaccgggtggatcacagactcccgcgtctggccagacgtaaggacaggcgggtgctgtgacctgatacgccgctacctgaaagcggaaatggttaaagacgggcaaagggagaaacggcaggcgggcatgctgcagggcggcccactgtcgccgttactgtcaatcctgctggatgaactggataaagaactggagcgtcgtggacacagcttctgccgctacgcagacgactgcaacatctacgtaagcagccggaaagcgggcgaccatctgctgaagaacatcagggcgttcgtggagaacaaactgaaggtgaatgagaagaagagcgcggtggcgcgcccgtgggatcggaagttcctcgggtacagtgtgacatggcacaaacaggcgaagctgaagatagccctgacgagcgtgaacaggctgaaggagaaagtccacagtctgacgacgggaaaccggagcaaatcagtgaaagcgacaatcaatgctctgacaccagtgctgtgtggatggataagctacttcaggctgacggaagtcagaggagtgctggaggagctggatggctggatcaaacggaaactgcgttgcttgttg

SEQ ID NO: 1027 - protein, 358 aa, Escherichia coli
MMINEAQAQATATSGRGDGQYPSGLHDGAEISTAAGGQTKAEVPLTMEAVITRENLMLAYQRVVENKGTAGVDNLSVAELKPWLKKNWRSVRQALIDGNYQPRQYAGWISRSPDGGVRTSGIPTVVDRLIQQAVQQAQRYIRVANGGWWIWIWRSSSTGWITDSRVWPDVRTGGCCDLIRRYLKAEMVKDGQREKRQAGMLQGGPLSPLLSILLDELDKELERRGHSFCRYADDCNIYVSSRKAGDHLLKNIRAFVENKLKVNEKKSAVARPWDRKFLGYSVTWHKQAKLKIALTSVNRLKEKVHSLTTGNRSKSVKATINALTPVLCGWISYFRLTEVRGVLEELDGWIKRKLRCLL

SEQ ID NO: 1028 - DNA, 1260 bp, Escherichia coli
atgattatgtttttaaaaatgcaggctgaaagtatgaagaataaatacaaattaaatgagtttttggatgtaaaacgccttcagaccctgcaggacaacttttcaaaatcaatgatgatcgcgctcgtggttgtggatgagaatggtatcccggtcactaagcccagcggtttttcagacttctgcatgcgttcgcgtctcaacccgacactggcgcaccactgttatgaaagcgacaacgctggtggccgtgccgcgatgcacgctcgcaaaccggtggtttatcgctgccactgcggttttgtcgaattcgctgtcccaatcatgattaacgatcattatctcggtgcttttatttccggtcaggtaaaagtcgaagaagagaaagaacagagcatttcctatattctgaataataatgacgtctggaaagataatccttggttaattaatttgcaccagaatacacgtcgcatgccgtataagcgttttgagtctactgcctcgacgttactacacgtatcgtcttatctggtcgaacaagcgcacaccaataatatccaacgcgaacttcgtaaaaaggatcttgcactggctaatgagttaagaaaacgtgtagagatagaacgctcactacatgaagctgaatttaaagcgctctcttatcagataaatccacactttttatttaacgtattaaataccattggccggttagcttttcttgaagatgcacagcgtaccgaaacaatggtgcacgatttctctgacatgatgcgctatttgttacgtaaaaatagtcacggcctgattactctgcgtaatgaaataaattacgtcaacaactatatgtcgatccaaaaagtgcgtatgagagaccgtttcgattacctgtgcgatatcccggaaaaatatctggatgtagtctgcccgtttttgatcctgcaaccgctggtggaaaacttctttaactacgtagtggagccaagggatagcaatagtcatctgctgatccgtgccacggacgatggcctgaacgtgattattgaagtcactgacaatggcgacggcatcgcaccagataccattaatcgcattttatcaggcgaccaaaaattgcaaaaaggcagtattggcattaacaacataaaaaatagattgaagttgttatttggcgagagctatggcttggaaataatgagccctaacaaacccaggatgggtacaaccattaaacttcggttcccaatgcaggaagcc

SEQ ID NO: 1029 - protein, 420 aa, Escherichia coli
MIMFLKMQAESMKNKYKLNEFLDVKRLQTLQDNFSKSMMIALVVVDENGIPVTKPSGFSDFCMRSRLNPTLAHHCYESDNAGGRAAMHARKPVVYRCHCGFVEFAVPIMINDHYLGAFISGQVKVEEEKEQSISYILNNNDVWKDNPWLINLHQNTRRMPYKRFESTASTLLHVSSYLVEQAHTNNIQRELRKKDLALANELRKRVEIERSLHEAEFKALSYQINPHFLFNVLNTIGRLAFLEDAQRTETMVHDFSDMMRYLLRKNSHGLITLRNEINYVNNYMSIQKVRMRDRFDYLCDIPEKYLDVVCPFLILQPLVENFFNYVVEPRDSNSHLLIRATDDGLNVIIEVTDNGDGIAPDTINRILSGDQKLQKGSIGINNIKNRLKLLFGESYGLEIMSPNKPRMGTTIKLRFPMQEA

SEQ ID NO: 1030 - DNA, 1053 bp, Escherichia coli
atgtttaccattgttatcgttgaagatgagcccatcgaattagaatccctgcggcagattatctcccagtgtgtggaaaacgctgcgatccatgaagcctcaaccggtaaaaaagcgattcacttaattgaccaactgagtcaaatcgatatgatcttagtggacattaatattccgttgccgaacggtaaacaggtgattgaatatctgaagaaaaaaaacagcgatactaaaatcatcgtaatcacggccaatgatgactttgatatagtacgcagcatgtacaaccttaaagtggatgattatctgctcaaaccagtgaaaaaatgtatcttgaccgacaccatcaaaaaaaccctagcattcgacgaaggagaaaatgaaaaatcccgcgccctaaaacagaaagtgttcgccatgatagacgattgcgattacacccagtggcacaactttatttttgacacgctcaacggtgcctgtccggtggatatgatagaagaggataagcgcaaagacgtgatcgattttctggaaatagttagccagtatatgaccgccaaaggggaaaagttaatgccgactaaccgtaaagtcgccgcgctgatcaaagacatcaaccagtatggcatgatggaaagccgctatttccgcatcatgatcagcctgctgaccattagcgaagagctgtttgattacgcattaaaaggctatacaggcaatatcgattttatcgaacgagcgaaattccatattgagaaaaatattctcagaaacttgacgctcgatgacgtggcagcaaaatcgtttgtcagtgcctgctatttgagccgtacctttaagaaaattaccgggttcgggttttcgaactatattgccacgcgtaaaattactatcgccaaatcgttattgcggttcagtgacttacaagtaaataccattgcgctggaactggcataccaggattcaaactatttttgccgcatcttcaaaaaagatactggcatgaccccctctgattatcgaaaagtcgtgtccccgggaattacacgg

SEQ ID NO: 1031 - protein, 351 aa, Escherichia coli
MFTIVIVEDEPIELESLRQIISQCVENAAIHEASTGKKAIHLIDQLSQIDMILVDINIPLPNGKQVIEYLKKKNSDTKIIVITANDDFDIVRSMYNLKVDDYLLKPVKKCILTDTIKKTLAFDEGENEKSRALKQKVFAMIDDCDYTQWHNFIFDTLNGACPVDMIEEDKRKDVIDFLEIVSQYMTAKGEKLMPTNRKVAALIKDINQYGMMESRYFRIMISLLTISEELFDYALKGYTGNIDFIERAKFHIEKNILRNLTLDDVAAKSFVSACYLSRTFKKITGFGFSNYIATRKITIAKSLLRFSDLQVNTIALELAYQDSNYFCRIFKKDTGMTPSDYRKVVSPGITR

SEQ ID NO: 1032 - DNA, 1149 bp, Escherichia coli
ttgaacgattacctgtttacctccgaatccgttgccgaagggcatcccgataaaatggcggaccaaatttctgatgccattttggatgcgatactcctacaggacccgtggggtaaggttgcctgtgaatgcttggtgaaaactggtgccactattgttgccggagaaatatctacccatgccgccgtggatattgagaagattgtccgcaacaccataaaagagattggttacgaccattcgcgattggggtttgatggcaatacctgctgtgtattaaatatccttggcaaacagtccgccaatattgctgacggcattcgcggccactcgatggaagaactgggggcgggcgatcagggcatcaccttcggttacgcctgtgatgaaacgtcggaactgatgcccgccacgctggtatacgcccatcgtctgatggagcgccaggcgcagttgcgtaaatcccaacggttaccatttttactccctgatgccaaaagccaggttaccctgcgctatcaggataatcgtgttcattcagtagataccgttgtggtgtctacccaacacagccctgacgtttctctggacgcgctacgggaagcggtcatcgaagaaattgttaaacctgtgatgccttcgcactggctcacaccacaaacccgctttctggtgaaccctgcaggcagttttgtgattggcgggccggtgggtgactgcgggctaacggggcgtaaaattattgttgatacctatggcggcgcggcttgccatggcggcggcgcgttttcaggcaaagatccgtcgaaagtcgatcgttccgccgcctacgctgctcgctatgtggcgaaaaacatcgtcgccgctgggcttgcctcacgctgtgaagtccagttgggatgggccatcggcctgccccgccctgtttccgtcaggattaacaccttcggtacacaaacagtgtcatctgaagcgttgctgagaggcgttaacagccatttcgatcttagcgtgttcggcatcattactacgcttgatctgctggtcccccgctatcgtaaaacagcctgctatggtcactttggtcgcgacagctttccgtgggaagttacggacaaagcggcgctattatacgaagacgttggacgt

SEQ ID NO: 1033 - protein, 383 aa, Escherichia coli
LNDYLFTSESVAEGHPDKMADQISDAILDAILLQDPWGKVACECLVKTGATIVAGEISTHAAVDIEKIVRNTIKEIGYDHSRLGFDGNTCCVLNILGKQSANIADGIRGHSMEELGAGDQGITFGYACDETSELMPATLVYAHRLMERQAQLRKSQRLPFLLPDAKSQVTLRYQDNRVHSVDTVVVSTQHSPDVSLDALREAVIEEIVKPVMPSHWLTPQTRFLVNPAGSFVIGGPVGDCGLTGRKIIVDTYGGAACHGGGAFSGKDPSKVDRSAAYAARYVAKNIVAAGLASRCEVQLGWAIGLPRPVSVRINTFGTQTVSSEALLRGVNSHFDLSVFGIITTLDLLVPRYRKTACYGHFGRDSFPWEVTDKAALLYEDVGR

SEQ ID NO: 1034 - DNA, 285 bp, Escherichia coli
atgtctgggaaaagtttaggcttaatcgaaaccgtcgggatgtctgcggcggtagaagccgccgatgccgcaatgaaatccgctaacgttagtctggtaggctatgaattgacgaaaggcggcgggatggtgaccgtgaagctggaaggggaagtgggcgcaattaacgcggcggtagcggcagccatcagcgcggcaagccgggttggcgaggtgtatgcccataaggtgatcgcccgcaccgcgcagcatatcgagcagattattcactctaaagtgaccgcc

SEQ ID NO: 1035 - protein, 138 aa, Escherichia coli
LLWSLWSRQLSVGSYGQSGAIIRRRWTLSRRRAAQLNLLQEKFMSGKSLGLIETVGMSAAVEAADAAMKSANVSLVGYELTKGGGMVTVKLEGEVGAINAAVAAAISAASRVGEVYAHKVIARTAQHIEQIIHSKVTA

SEQ ID NO: 1036 - DNA, 567 bp, Escherichia coli
atgtcaatggagatttcaacagtggtgcggcacacaaaatttgcagcggaagaaacccgcaaacaaatcctggatgtggcagagttctgcttttgtgagacgggcttttcaaagacgacactggagatgattgcggcgcgcgcaggttgtactcggggggccatatactggtatttcaacgaaaaaaaagatcttctgcgacaagtcatcgagcgggtaccactatcattatttgatgagcttacagccatcaaaaatgggagagtttctgaaccggttaaagcgatgtatcgttgcttatcacgtagcctgattaaattacaatataatgtacacttacggaatgtaatttatattgtgtttttttgtgaagaatgtccggatgatataagaataaatttcttacaaaaaatggtggatgtcaataattttgtgaaattactatgttatattttcgaaaaaggtaagttatatagagaaatatgttcggaaattcgtagtgagactctggcgttcctgcttttttctttgtttacgggggggggggcgaagttgcattctgcaacc

SEQ ID NO: 1037 - protein, 189 aa, Escherichia coli
MSMEISTVVRHTKFAAEETRKQILDVAEFCFCETGFSKTTLEMIAARAGCTRGAIYWYFNEKKDLLRQVIERVPLSLFDELTAIKNGRVSEPVKAMYRCLSRSLIKLQYNVHLRNVIYIVFFCEECPDDIRINFLQKMVDVNNFVKLLCYIFEKGKLYREICSEIRSETLAFLLFSLFTGGGAKLHSAT

SEQ ID NO: 1038 - DNA, 5203 bp, Escherichia coli
ttttttgctcatctttggcattggcataactgaatgacgtcaccagccccagcgtgtccgtaaattcataacggtatttcacgttaatgcccttcaggtcatcactgcctggcatatcagtatgggtctgaagatacccggcgcttagtgtggactgatgctctgctgcgctcgctggcgtaccagcggcaaccagccagactactgcggacagaataacagcacataatttacgcataattacctctcgcttttctgcaataaaaaaggcgtcatttctgacgcccgtattggggctataaaattcagctgatactgatgcctgcggtggctttcttcatcaccacaaccagcaaatcgctgatacttgctgtgggataccagttatttaccagccatgctgacaccgaaaactccagcgtcatgtgaccgtgaccggcaggcatatcaataacgccactgtaaatcagcgtattatccagcgcggtacggttataaatttcagcaccgtttttccgcactatcagacggcatgaggagtaaatatcagtatgctctctctcatgcttagcgccgctgaatgccaccgccggaataacaatctgtcggtcaaacggctgatcgtcataaatcctgacggtaatggtccctgatggccaccgttccggtgcacgggagtcccgggggaaagctttacccactgttttaacgagatcgccttcaatctggttcgcggacagttttcccagaacccggcagttctcgttaatcgtgacgttgttgagcgtcccggagttcgcattcacgttaccgctgatatcggcatttttcgccgtcagccgcccgtccggtgtcagggaaaatgccggaggattaccgccgctggtaatggtgggagccgtcagatatttcaggaacacttcgttcatgaatatctgatcgccctgaccaacaaacatcggctttgtgttgccattcgcaggattaaccatcgcaatcctgtccgccgccagcagcacctgactctgcatgccgtcaggggtgttctcaataccggcaccaatacccgcgatataaaggcgtccgtcctgcatctgctgcagcttcacagcccacatgctgttcaggttattatttgtatcaacctgaaccttctgtatctgctgaattgccgcactctggtcttccagtttcttattgacggtctgcgtgatttcattgctgacatccgtaatggacgtcctgatttcagccaggtcaggcgcaagctgaccgttatcaatctgcgtccacagctcctgagccagatggcttttccctatctcgcctttgaaaaaatccagatagccggatgcatcatcactcggctggccaacagcctccacaaatgccgatttgccaacggtgttcacactgcggatgtaaaaataataatcatggcccggtttgatattgatactggcagctatccagtacagcgccgtgccaagatagcgggctgtggtttcaacctgcctgatatccgcaatccgcttttccgagaaccagaactcaaactgtaccgtcggatcataaacggcaagatggggcgtggcggttatctgaaaatagcccggcgtcagctcaatccgcgacggcgctgccggtgcggcaatccggaacgataccgatgcaggatcgccctgctgcccccaggcatttgccgcccggactgtcagcctgtagcttcccagcgccagctgcctgaagcggtatgtggtttccgtcgtccgggccgtgctgaccagccgctcactgccgtcatccgctgccacggtcaggcgaagcataaagctcacacccttcaccaccttcggcgtatcccagcgcgccagcacctgatattccccgctgtctgcagtgacttctgcggtcaggtgctgcaccgctggcggcgtgacaccattcaccgtgccactctgttcgccgtcaaagtgcgccccgttatccacgatggcctctttttccggcacatgctgcacggcggtgatggcatacgtgccgtcgtcgttctcacggatactcacgcagcggaacagtcgctggcgcagcgtcggcagcttcagcccccatacgctgtattcagcaacaccgtcaggaacacggctcacttttaccttcacgccgtcggtgacggactgaacctccacgctgaccggattgccacttccgtcaaccaggcttatcagcgtggtaccggaggatggcagcgtgatttcacggtcgagcgtcagcgtccgggtctggctgttcaccgccagcacacgaccactggtgctgataccggcatagtcatcatcgcagatttcaatgatatcgcccggtacatggcgaagcccttcagcacccacgctgaagtccacggtctgcgtttccagcagttccgttttaatcagccacagcccggcgcggtgtgcctgcccccgactggtacaaccaaaggcatccatcttcgtgacattacgaccgtaacgggcaatggcctgcgtatcttcaacaagctctgtcgccgtctcccagccgttgtccgggtcaatccagttcacctcaacggcattatggcggtccttcagggcgctgaagctgtagcggaacggcgcgccatcatccggcatcaccacattactgcggttataggtccacaccttatctgatggtcggtcctgcacgaacgtcagcgtctgcccgttccataccggcatacagcgcatcgccgagcagaaatcactgagcacatcccacgccttacgctgcgtggtcagccaggcattacaggtgatgcgcggctccgtgccgccaaaaccgtccggcaccgactggtcgcaatactgtccgatgacatacagcgcccatttgtccacatccgccgcaccaagacgtttccccatgccgtagcgcgtatgggtcagcatatcccacagacaccaggccatgttgttgctgtatgccggtttaaacgttccgtcccagataccgctgtattgccgcgtctgcgggttataattcgacggcacctgcagaatacgcccgcgaagatgataattacggctcacctgctgactgccgaactgttccgagtccacctgcacgccgaccagtgccgtgttcgggtagcactgtttcacatcgatgatttcggtgtatgacgaccagagcgttttgttctgcagctggtctgtggtgctgtccggcgtcatcctgcgcatccggatattaaacgggcgcggcggcaggttatccaccaccaccgaggccagatactgtgaggtggttttgcccttaatggtgatgtctttttccgtcacccagccaccattacgctgtatctgaaccagcaggcgaacttccgacagattccggtccccctttgaggtggtttccaccagtgcctgcacaccgaaggtaaagcgcagacggtcgatgtttgccgacgtgatggtccgggtaatcggcgtgtcgtacttcacttccgtacccagcaccgtctcggagccggaggattcaaatccctccggcggtgtctgctcctgctcacctgcccggaacaccaccgtgacaccggagatattggtattcccctcactgtccagcactggcgtactgttcagcagcacactttttaatccgtccaccggaccttcaaccggcccttcactgatggcgtctatcacgctcagcatctgggatgatttcaggttgtccttcgcttcgcgcggggtatgccccttactgctgcctttacccattcgtcatgatccataaacgataaaaccgcccggaggcggtttcacataaaacattttgcatcagcgaccaatcaccacaacctgaccaccatccccttcgtctgccgtgctgatctcctgagaaatcacgcgtgaccccacgcgcatttcaccgtacagaacgggcagaacattcccctgggcaaccatgttatccagtgaggagaaataggtgttctgcttaccgttatccgttgtctgtgtgcggggagttctggctttcggtgccagcatctgcgccacaccaccgagcaccatactggcaccgagagaaaacaaaatgccggtcataccaccggcaccaatggctgccccccatgctgcaagggtggctccggcggtaaagaatgatccggcaatggcggctgctcccaggacaatctggaatacaccacctgacttggccccggcgactctgggaacaatatgaatcacagcgccatcaggcagagtctcatgtaactgcgccgttaatccggacgtgctgacgtcccgcccggcaatccgtacctgataccagccgtcgctcagtttctgacgaaacgccgggagctgtgtggccagtgcgcggatggcttcagcccccgttttcacacgaaggtcgatgcggcggccaaatcgttgcaaatccccgtaaaggcagatgcgtgccattcccggtgacgccagagggagtgtgtgcgtcgctgccatttgtcggtatacctctctcgtttactcagttgttcaggaatatggtgcagcagctcgccgtcgccgcagtaaattgcggcatgattcggcaccgatgaaccaaagcagcacagcagcacgtcgccaggctgcgcctctgtcagtgcgacacggtaaaaaccagtcgcctccatattgccaagatagagattctgaccgttacgccaccagtcatccccgcgatgaaaatccggcatctcaatccccgccagatgataagcatcccggaacagcgtgtaacagtccgtcaccccgtgctcaaagcgacgcccggtaagatgtggcacacagcggaacttgtgaatcgccccccggcagaccagccaccacggcaaatcactctgcacctgcagccgccggtcagcctcactcagccagggcagaccaccgggatgactgtggaccagtgccacaatctcaccctgcatctctgcctgcagccagtcctccggagccatccggaaataatcctccggctcaccggaaatattcacgcagggaaaatatctttccccctccggcgctctcaccacgaagccgcacgactccgctggcgcacatcgcagggcgtgcgccagaatcgctgattctgtctctgtcatgggattactgcgaaagtttgttaatggaaaggaagccgccaaagt

SEQ ID NO: 1039 - DNA, 237 bp, Escherichia coli
atgcgtaaattatgtgctgttattctgtccgcagtagtctggctggttgccgctggtacgccagcgagcgcagcagagcatcagtccacactaagcgccgggtatcttcagacccatactgatatgccaggcagtgatgacctgaagggcattaacgtgaaataccgttatgaatttacggacacgctggggctggtgacgtcattcagttatgccaatgccaaagatgagcaaaaa

SEQ ID NO: 1040 - protein, 79 aa, Escherichia coli
MRKLCAVILSAVVWLVAAGTPASAAEHQSTLSAGYLQTHTDMPGSDDLKGINVKYRYEFTDTLGLVTSFSYANAKDEQK

SEQ ID NO: 1041 - protein, 782 aa, Escherichia coli
MPDDGAPFRYSFSALKDRHNAVEVNWIDPDNGWETATELVEDTQAIARYGRNVTKMDAFGCTSRGQAHRAGLWLIKTELLETQTVDFSVGAEGLRHVPGDIIEICDDDYAGISTSGRVLAVNSQTRTLTLDREITLPSSGTTLISLVDGSGNPVSVEVQSVTDGVKVKVSRVPDGVAEYSVWGLKLPTLRQRLFRCVSIRENDDGTYAITAVQHVPEKEAIVDNGAHFDGEQSGTVNGVTPPAVQHLTAEVTADSGEYQVLARWDTPKVVKGVSFMLRLTVAADDGSERLVSTARTTETTYRFRQLALGSYRLTVRAANAWGQQGDPASVSFRIAAPAAPSRIELTPGYFQITATPHLAVYDPTVQFEFWFSEKRIADIRQVETTARYLGTALYWIAASINIKPGHDYYFYIRSVNTVGKSAFVEAVGQPSDDASGYLDFFKGEIGKSHLAQELWTQIDNGQLAPDLAEIRTSITDVSNEITQTVNKKLEDQSAAIQQIQKVQVDTNNNLNSMWAVKLQQMQDGRLYIAGIGAGIENTPDGMQSQVLLAADRIAMVNPANGNTKPMFVGQGDQIFMNEVFLKYLTAPTITSGGNPPAFSLTPDGRLTAKNADISGNVNANSGTLNNVTINENCRVLGKLSANQIEGDLVKTVGKAFPRDSRAPERWPSGTITVRIYDDQPFDRQIVIPAVAFSGAKHEREHTDIYSSCRLIVRKNGAEIYNRTALDNTLIYSGVIDMPAGHGHMTLEFSVSAWLVNNWYPTASISDLLVVVMKKATAGISIS

SEQ ID NO: 1042 - protein, 782 aa, Escherichia coli; identical to SEQ ID NO: 1041

SEQ ID NO: 1043 - DNA, 1110 bp, Escherichia coli
atgggtaaaggcagcagtaaggggcataccccgcgcgaagcgaaggacaacctgaaatcatcccagatgctgagcgtgatagacgccatcagtgaagggccggttgaaggtccggtggacggattaaaaagtgtgctgctgaacagtacgccagtgctggacagtgaggggaataccaatatctccggtgtcacggtggtgttccgggcaggtgagcaggagcagacaccgccggagggatttgaatcctccggctccgagacggtgctgggtacggaagtgaagtacgacacgccgattacccggaccatcacgtcggcaaacatcgaccgtctgcgctttaccttcggtgtgcaggcactggtggaaaccacctcaaagggggaccggaatctgtcggaagttcgcctgctggttcagatacagcgtaatggtggctgggtgacggaaaaagacatcaccattaagggcaaaaccacctcacagtatctggcctcggtggtggtggataacctgccgccgcgcccgtttaatatccggatgcgcaggatgacgccggacagcaccacagaccagctgcagaacaaaacgctctggtcgtcatacaccgaaatcatcgatgtgaaacagtgctacccgaacacggcactggtcggcgtgcaggtggactcggaacagttcggcagtcagcaggtgagccgtaattatcatcttcgcgggcgtattctgcaggtgccgtcgaattataacccgcagacgcggcaatacagcggtatctgggacggaacgtttaaaccggcatacagcaacaacatggcctggtgtctgtgggatatgctgacccatacgcgctacggcatggggaaacgtcttggtgcggcggatgtggacaaatgggcgctgtatgtcatcggacagtattgcgaccagtcggtgccggacggttttggcggcacggagccgcgcatcacctgtaatgcctggctgaccacgcagcgtaaggcgtgggatgtgctcagtgatttctgctcggcgatgcgctgtatgccggtatggaacgggcagacgctgacgttcgtgcaggaccgaccatcagataaggtgtggacc

SEQ ID NO: 1044 - protein, 370 aa, Escherichia coli
MGKGSSKGHTPREAKDNLKSSQMLSVIDAISEGPVEGPVDGLKSVLLNSTPVLDSEGNTNISGVTVVFRAGEQEQTPPEGFESSGSETVLGTEVKYDTPITRTITSANIDRLRFTFGVQALVETTSKGDRNLSEVRLLVQIQRNGGWVTEKDITIKGKTTSQYLASVVVDNLPPRPFNIRMRRMTPDSTTDQLQNKTLWSSYTEIIDVKQCYPNTALVGVQVDSEQFGSQQVSRNYHLRGRILQVPSNYNPQTRQYSGIWDGTFKPAYSNNMAWCLWDMLTHTRYGMGKRLGAADVDKWALYVIGQYCDQSVPDGFGGTEPRITCNAWLTTQRKAWDVLSDFCSAMRCMPVWNGQTLTFVQDRPSDKVWT

SEQ ID NO: 1045 - DNA, 671 bp, Escherichia coli
atggcagcgacgcacacactccctctggcgtcaccgggaatggcacgcatctgcctttacggggatttgcaacgatttggccgccgcatcgaccttcgtgtgaaaacgggggctgaagccatccgcgcactggccacacagctcccggcgtttcgtcagaaactgagcgacggctggtatcaggtacggattgccgggcgggacgtcagcacgtccggattaacggcgcagttacatgagactctgcctgatggcgctgtgattcatattgttcccagagtcgccggggccaagtcaggtggtgtattccagattgtcctgggagcagccgccattgccggatcattctttaccgccggagccacccttgcagcatggggggcagccattggtgccggtggtatgaccggcattttgttttctctcggtgccagtatggtgctcggtggtgtggcgcagatgctggcaccgaaagccagaactccccgcacacagacaacggataacggtaagcagaacacctatttctcctcactggataacatggttgcccaggggaatgttctgcccgttctgtacggtgaaatgcgcgtggggtcacgcgtgatttctcaggagatcagcacggcagacgaaggggatggtggtcaggttgtggtgattggtcgctg

SEQ ID NO: 1046 - protein, 223 aa, Escherichia coli
MAATHTLPLASPGMARICLYGDLQRFGRRIDLRVKTGAEAIRALATQLPAFRQKLSDGWYQVRIAGRDVSTSGLTAQLHETLPDGAVIHIVPRVAGAKSGGVFQIVLGAAAIAGSFFTAGATLAAWGAAIGAGGMTGILFSLGASMVLGGVAQMLAPKARTPRTQTTDNGKQNTYFSSLDNMVAQGNVLPVLYGEMRVGSRVISQEISTADEGDGGQVVVIGR

SEQ ID NO: 1047 - DNA, 741 bp, Escherichia coli
atgacagagacagaatcagcgattctggcgcacgccctgcgatgtgcgccagcggagtcgtgcggcttcgtggtgagagcgccggagggggaaagatattttccctgcgtgaatatttccggtgagccggaggattatttccggatggctccggaggactggctgcaggcagagatgcagggtgagattgtggcactggtccacagtcatcccggtggtctgccctggctgagtgaggctgaccggcggctgcaggtgcagagtgatttgccgtggtggctggtctgccggggggcgattcacaagttccgctgtgtgccacatcttaccgggcgtcgctttgagcacggggtgacggactgttacacgctgttccgggatgcttatcatctggcggggattgagatgccggattttcatcgcggggatgactggtggcgtaacggtcagaatctctatcttggcaatatggaggcgactggtttttaccgtgtcgcactgacagaggcgcagcctggcgacgtgctgctgtgctgctttggttcatcggtgccgaatcatgccgcaatttactgcggcgacggcgagctgctgcaccatattcctgaacaactgagtaaacgagagaggtataccgacaaatggcagcgacgcacacactccctctggcgtcaccgggaatggcacgcatctgcctttacggggatttgcaacgatttggccgccgcatcgaccttcgtg

SEQ ID NO: 1048 - protein, 247 aa, Escherichia coli
MTETESAILAHALRCAPAESCGFVVRAPEGERYFPCVNISGEPEDYFRMAPEDWLQAEMQGEIVALVHSHPGGLPWLSEADRRLQVQSDLPWWLVCRGAIHKFRCVPHLTGRRFEHGVTDCYTLFRDAYHLAGIEMPDFHRGDDWWRNGQNLYLGNMEATGFYRVALTEAQPGDVLLCCFGSSVPNHAAIYCGDGELLHHIPEQLSKRERYTDKWQRRTHSLWRHREWHASAFTGICNDLAAASTFV

SEQ ID NO: 1049 - DNA, 12943 bp, Escherichia coli
tggcagaaaggaaagctgttgcattgttccagcccctttcagtcaatgatgcgcataatggcgttgcattccggatgctgcagggcgtagtcccgcagacggtaataatgaaccgtcatggcataacactccgtgcgacaggcatgatgactgtacgtcatcagacaggcagcaatgccggcggcttccgggctcatttcagcacggttaccgttcatggcattgaacagtacccatgtctcgtcatcatcgtcatccggttcgggtgccataaatgccccgccgttgttcagggtgtacagattccagataccaccgcagtagtcttcgcaaagatggtccatccagccgaagacacggggttccagggtcacccactgtggaatgaggccaaaatgctgcggccagaagctgatgcgctgttcatgaggaacgagagtggcaaccagttgaggctggtcattctctgaagctgtgactacggaagcagaaagtgtacaggtgttctgagaaacagttttcatgagtgaaatccttataaaacaaataaatgcagggttttcggggagcagggggtaggggagcctgaatcacgtcttcagggatgtgctgcatcagcgcatgttctccagcagcgtttctgtcattacccacaatgcgcgattgagcttaatgtccgtgtcgatgctgtgaatggcacgggtgtggatacgttttcctttagcgctgcgaccggaaatcccgcctttcagcatattctcctggatggtctgatatgcgctccacaggtccttaccgtaatcctcccggcgtcgcggcgtcagaatgtcggcggtggtgacgggctgatgttcgtcaccataacggtaagtcagtgccgcctgtgccagcgcctggcgtgccagtggcggcaggaccagcgactgcatggcgtcacgcttttcttcaatccggtcaaaaacccccaccacctcgtaagccccttcgataactttctccactacatttccccggtgtggaacacgcacttcccccagagactgaccacagacgcatccgttctggcagacgaacctgaagtaacccggcagcatctggtagctggaggtaccgtcatgggagttcagcaggatgatttcagggacatgttgtccgtttatctccccgtcacggcgcagacgcagcatgtgtttggtgtatccccggcggcccgggtcgcgcacacgggtctggcaggcgaagaatggctgaaaaccttcccgctgcaggctttccagcactgtgatggtggggatccaggtatagttctcgcttctggatgtgtgcttatcttccccgaatacgctggggacgacctgcatcagttcttcacgagttaagggacgatcacggcgtatctgatttacatgaccaaaacgactggctaattgcatactttgctccttatgaatgagttagcggtataaatgaaaaggccgcgtctcccggagaagacgcggcctgatggatgaaatgaagacgtttattgcctgagaattccctcactggcgagatatggatttagctgttttccggcatcaggttcaaaattccagcaccgccagcgtagctgcccttcagcattgtggataaccagccggaaatgcgttccctgatcatcttcaataagcacattgcggtaagctgttgtgacagccatcgcctgttcgcgtgagaaagggccttcgggcaataaaacagggtgacagtccgacataccggctattttccgataaattcaacgctggcaccggtggcattaccgtcagcaccaaccgtgacggtcactttgtcgtacgcacggtcttcaggattgaacacttcaaactcaaccttattgccttttacttcgtaagagccaaaatcagcggtttctgttgtttcctcgtcatattcccgggcgtatgcctgccgggcagcctgcaggacggaatctttattaatggcgggtgtctgtttcggggaaaaaccagcaagtgatgtgacaaatttcggacagaccttcagcatatcaccgcgggtgaattccattcgtacaccaaatgcctgtaaaacggacacatcacgctctgctatggagtgaacggcttttttgaccatttccggcgcctgtccgacttccacctcaacagccctgaatcccgtctgctgattacacatttgtgatgtggggatcaggttaccgttaatactgatacggctgcccaggagcgtctgtacaccattcgggcatccctgcatcaggccggtaataccaatcgtgccatttttcagcattaccagcgcctgaccatcttccgtcatggtctgacaccagccgtttttgacagcccagttgccggcggaggcggagaatgatgccacagtgaacagcaggggaaaaagagctctggtattcatgactgacctctgaaatgaacgtacggtgttattgataatgatggaaggtatgcagtgactgttcagggaatgacgtagccgtatatttagttttctgttcaacatattgtctccatacctgttgggacggctttggcaggccggcgatcacaggttaaaggtgttgataagtttatggatgaaagagaaatgtggcagggcggagataaaacgctcttcagcgaccagactgtggatgtggcctctccgttcaaaccgttctgatgtcaggctgactgatttgatatctgccagaggaaagacctgcagttttcccttctgtaacgcgatcagataccagctaccgctgtaataaatgagccggcagggctccagtgacggataccatcgctcagccatcagagagatgtggatacactgtcttattgccaggatgagttgcgagaaacacttggggaacgttgcagtgatatccggcgccggtagccagataaggcagggagagggctcctggttgtcggtaagacaggttatcagtcgtccgttccggagcggaagtatccgtgcgatcccggtattctgtataaaagaaagcatttcagggatcgcacccgggctgctctgtcgtctgaggctgtacctgccatttctgtactctaaatccaggtgaaccagacgctgatgaaaatcgcgctgtaaagtacgttctgtaacgccaaattcatctgacagtgtttttagtgacagagattctccggtcatcagtcggctgataatgagtgataagcgaaccgccaggcgatcatgccgggaacgattatcagacatagatgtgcactccgtaagaaaacatcttttatttcatgatgttattatgcatcatgatgttgaaaggatgtgtcgcatccggataatcaggaataaaatgcagcagaaaaaatattcttttaattatctgatttttaagcatgatttcataaaaagaagaatgctcgttaatccagcgacacatcctgtcggcgtgagtgtgtcagaacagacgctcccacagtgtgatcagcaggtggataatgcggtcccgggttttgcgcagaagctgtaacatccaggccggaaaactgaaacgggcaacggcgtcgtcaaaacttttcccgatggtttcaccaaaagtctgttgtgcgtgtttccgggcctgttcagagcggttttctccccggatatgtgaatacaccgcgctggttgcctgtggtggcagtgcgtggatcatcagcgacacaaacgccggaaggttccagccgacaggtgcagcaacggagagtactggaaatgatgaagggaacagggttgccacccgggctgtcaccgtcgccagtgagagcgcctgctgacgggacgggcatttttctgtggcattccattcttcagcaggaaacacgcgatcggcatggctgagaacaaacagaaaacgcgagggatctgcgccttcattcagtaaaaactgatgcatggtaatgtcggcggcatacgcgcgttcatctgcccgcaggatccagataatcagatccagttccggtagcagctgacgataaagtgtccggtattcctgatcatgctgcggtgtttcaccaatgccgggcagatcgaccagcgtcattctgcgttcaccgagttgcagggtaagacgatgagcctggcgggtgcagccgttcaggggatgcgtggcgcagatacgggactgaaaaatggcattacacaggctgcttttgccggtgccggatttacccataatgccaatcacgggctcgtaatgaataacactgtggagatgttcaaggattttctggcgaatttcttcaggaagaaacgtcagatatgatttcacttgtgcggagagggaagaatggctgaatgacataccggtatcctgttgatttcactgaaccggatcacactaatccggtttatcattcaggtaatatgggcgtgaaaaaatctggagtgacaaagttcgggaggagtgatggcatcactgtcgattaatacgctacgccgaatgagcatttgtaaaagtcaggcctggaaagatacccagcgaatactgaagcgtagtggacttgtgtacagaggggaacggtcagaatcgtttgatcctgagaaacattttaatcgttatacggtgcgttatctgtacctgcttaacataattgcgcttaagataaggtcggttagtaaattttcctgttggatcgaggtgggacaatgccatcgtatgactggtaaacatttatctcttaatgccccgccttttatgctgattccgcgtagtatccggagaaaagtggatggattcagacagtcaaaaggtgaagcaaccccaaaatcggctcaaccgttcacgggcagtttgtatgaggttttgagcaaggagagcgattcagctaagctggacgcatggattgctgaactgcctctgaacttgcaggaggagggaaaggaaatctcagtcatgggatttagtccacgggctgtggcccgacctgttcttcggtcagcatccccgacgtttgaactgttttatcaggagtatcaatccctaagattaaaatctgtttttaaatttgaaccaagatttgaacaacttttaacaagactgagctttagaaaacaatcaattctcagaaaacaacaatacagggttaaatcgcaattactggagagactggggaatgtgttgtttttcacgtcgctttataaccagggatgtttagaggagtttataaatgcacttgtggaaaaggaggacatttatctgaaaatgtcccctggggaggaaaaggtgaaagcacaccagaaaatggttaactacattgaagcgttctgcaacaaaatgacggaaaaatacctgatgcccgcagcaagcagacactacaaaaagaagaaaatcgctaggagcgaaagtggtgaaagttaatccagtctaccgtacagaatcagttgttccagaatagcctgctgtgttgttttccgctctctggtcagtctgtccagagcgctttttgcggatggcgatatctttacgttgatttgtacccgtttatctttttttccatcgataaactgttttctgaatgcattgtgcatcttgtcgaaaaatctttcttttgcagcgaatcctaggtgaaattcttttggcgtcagtaaacagggtgtgtctgtagggaataacatttttagtaaaactacaatggcaatatatctttcgttatcatttacaggattaaaccaggaaagatatgtgggtgagatacgtgcatcaatatattcccatgcccatttcagttgttcggtattctttttaagccatttggcttcgtttctcttttcgagtcccagccagttttgatgcattattgagataatccgatctgcttccccataaaggattaacgcattaatccatttccctataacattcagtcgtgtttcatgacttgaaggaataattgtcatggggttatccttcataacgatcacccccttcaaggcagaattgaactcagattcattattaagtttaagtttttcgggaactgtatgagacataattaaccagaaccagaatgctgcaatttcattttttctgatccattcaggtatgtgattatctgccagattattatcattcaataaatgctcagttgttttatttttccagtcatatctattcacgttataaccgcctttatattgtttcatctgattacgcctcaatcgttttcttttctggtgattttcaccatcacatgtcagttgtatatgcaagggaatcaataaaaatatcaccctgcaagcacttcaaagctgattatggggatattctagaactattcacaaaactattccagacatatcaagaactatttcttgatctattcataataaaataaaacatgctatcaactacggatcatatcctccttaggtgtgtcgttgtactgttcgactgttcttgtggtcagattaacaatctgaagagtaaaagcgacagtaatctgtctgttatagtggcgataaaaacactgactgcgcatcctgtatgtgaaatcctgtcatgtagagcagtaagcaatgacagacatgcatgttatatgtgaaggggccgggagatgaaccgccccgggtttcctggagagtgttttatctgtgaactcaggctgccagatcatcgtttccgatggaagcataataagctttttctgcttctgccggaggagtatggcccagcctttccagcaatcgtcgattgttataccagtccacccacgtgagtgtggccagttccacttctgcacggttttcccagctcttacggtgtattacctccgctttgttaagaccattgatgctctccgccatcgccgttgtcatacgagtcgcctgttacttcctgttgatgccagtaatccggcttccttaaccgctgtgtgtagccagcgatacatactgagaactttatcactgtgatggaccgtgccggacggtcgacgggcccataacgcctgctccagtgcatccagcacgaatgtcgtttccatggacgatgagacccgccaccccacgatgtatccggcaaacacatcaatgatgaacgccacatagacgaagccccgccatgtgctgacgtaagtaaaatcagccacccacagctggtcaggtcgttctgccacgaactgacggtttacgcggtcgcctgcggcaacggctttccggctgatggtcgtacggacctttttaccccgagaacaccggcaagtcccataaccgccatgagacagtgccacagtgcatctggccactctgataccttcccgtaacaactgacgccagactttacgcacaccgtataccttgtgattttcatcgtatacgcgctgtatctctttcttcagccagtcatcgcgctgcgcacgggcactgcgtttatccggatgatgtcgctgttgctgacagtggtaatacgttgacggggcaatatgcagttcgctgcatagcggtccgaccccgtactgctcacgcagcttatccagcagtggcatcattttttccagaggcggtcgaactccgccttcgcaaaataagcggaagcctggcgaaggatatcgttactgcggcgcagttcacgattttcacgttccagctctttcagacgctgacgttcagcggtggtgagccctccatcaccgcccccggtatcccgctcatgctggcgaacccagacacgcagagtctccggcgtacagccaatctttggagcaatggaacaaattgtcgcccattgtgagtcatattcgctctgactttccagaaccatacggactgcccgttgacggacttcgggggaaaaacgagtatttttagtcatcctgtttacctctttctcaggaagtttagtctccaggattcccggggcggttcaagacgacataatcagtatggctgtcattctggttgtaaaacgcgatcactttccgggggtaaaagatgatatggaggttgacaaacggtttgcttcggattgtcttttctggggcctgaagtacgggggcagaaaaataattccagagtaaatctgctctgtttttaggacagaaaactccatgctggctgtaaaagtgaaaaattaacacctagtatgtatggaagtctgaagatattgagaatgtcggtatgatactatatacacatattttactaagtatttttactaagcatttcagtaagtgttatacacgtattttctactaagtgttttaccagacatacacgtgttttcataaacagccctataagtgttttcattaagcattgctgtacacattgctttgtctgaaacacatccagtttagtaaatctttacgttagctaaaatcagtttaaagctgctgtaaaacctttttgtttaagcaatcaatctgctattcgattttactgatgttgcgtttaaccttttctgagtttttgtgtttttagtcgttaacctgagacaagtgtctttacgtaaaaacgcaaatccgactgagataacctggtgtgatttacggtgtgcttgcgacgattttgttaaatggttctatggatgattttgtgacgatgagattgatgagatgattaactggccctggtgttttttctcagtgcaaggtgattatctttatcataaggctcttttcagaaaaagcgtgatgattggttctggtgttttgattcagatgagatttacgttatcgatggttaatcgtttttatggtgtgttgaaaagtaacgttttcaggataagaaaatcgattctgatattggtgaactttgttcttgtggcagagttatctgtaaacaggttttaagtgcgctattcggctctgtgattgagttgtgtggttaagctgtaggttttggtgttgttgttgatttgcattgccaggaagcgttctggttgcgtttctggtgttttgttcgaatgttctgtggatccttttcccttcaggcttttctcgtcgtccatgtcgtttttaaatccattcatgctgttgttgcgtgttttgctgctgtgtgcaggattatcttttcgttccgggatggtttgttccgtttcaatcactcttaatcagagagttgtagcattgctcaatgccggatgccgtaaagttttaccgcgttgatgaatgatgtgaagtcaatccaaatcaacggagatctctcatcatgaatcaaccaatacacaatgcttactggttatcccgttttgacatccttctcgacagtgccctggcgcagcaccgtgccgtctcgttaatccgagtggatttacgtttccctgagtatatgcctgtcaccatcatggatcccgatccggattcagcggtgatttctcgtttttttgcatccctgaaagccaaaattcaggcttaccagcggaaaaaaagatgtgccaatcagcgtgtgcatgcaaccagcctgcgttatttctggtgccgggagttcggcaagatgtatggcaggaaacattatcacgtgatattactgctcaacaaagatacctggtgctcgatcggggatttcagcgaaccgtcttcgctggcgacgatgatccaggaggcatggtgcagcgccctgcatcttgagccctggcaaggcgatggcctggtccatttttccaggtggacgccttcccgtaaaccagcatcgtctgatgctcgcccttcttccgatgacacgcctttgtcgggtggatgttctgatacctggaaggcttcagacaaaaagccgggtgaagccgctgttctctggatcaagcgtggtgatgtgggagcgctgcagaaagcccggaacagagccagttatctcgtaaaatatgaaacgaagttgcataacggttccgggcaacgtaattatggttgcagtcgtgggccgggacgtctactggatggcaggagaagcctgtaaaacggcatccggagcctgagcttatgccacagtaagggcgtcagccaacgcccttagctcgttttctgaaaaagtcgtcctgaagtcatgtatctgcttccattctcatgttcatatttcaccttacgctttcactatctgttattggaagtaccgatttattttggtgctgctcacttacggtcattcacggaagaggatggtggtgaaccgtacgatcctggctgctggcgagggaaggttcaggactgggatggagcaggtttagtggtggaagatgagtcggaatttctgactggtcagtgaggtgatgatctggtgtaactcaatctgctagggtaaactctccttgcttttgcgcacaagcagtgggccctggttcgcttatgtcctgcatctacaagcgaatgactgaccggagactcccatatctggtcagtcgcccatttttattttctaccaaatcagacaagcataccgtaataaataacgccagtcccctgtcgctctcgtgtgctctactggaatgttgttgatggagatatccagatgaaagagcttacatcttcgacaggactataacttatgtagtaaagagttccccggagaaaggggctgttctgctgttctcatcaagtctggcatgttcaggaaattattcgaaaatattaactgaatgagcgaaatgtgatttaccttcttttctgttcattgtaaatttcctctttgctaacgcaaatcattatcattacgcctttggcaaagggaaatttatgaagaacaaatatatcattgctccgggcattgccgtgatgtgttctgcagttatatcatcaggttatgccagttctgataaaaaagaagatacgcttgttgttactgcctccgggttcactcagcagctcagaaatgccccggccagtgtctcagtcattacttcagaacaactgcaaaaaaaaccggtttcagatctggtcgatgcagtaaaagatgttgaagggattagtatcactggtgggaatgaaaaaccggatatcagtatacgtggtctaagtggcgattacacgctgattctggtcgatggacgacgtcagagcggtcgggaatccagaccaaacggcagcggcggttttgaagccggatttatccctcctgtggaagcaattgaacgcattgaagtgatccgtggccctatgtcttccctgtatggttctgatgccatcggaggggtcattaatatcataaccaaaccagttaataaccaaacatgggatggcgtacttggacttggggggattattcaggaacatgggaaatttggtaactcaaccacaaatgacttctatctgtcaggcccattgattaaggataaacttggtcttcagctatatggaggaatgaactatcgcaaggaagatagtatctctcagggaacaccggcaaaagataataagaatataacggcaacgctccagtttactccgactgaaagccagaagtttgtttttgaatatggaaaaaataaccaggtgcatacattaacacctggtgagtctctcgatgcctggactatgcggggaaatcttaaacaaccaaacagtaaaagagaaacgcataattcacgtagtcactgggtagcagcatggaatgcccagggcgaaatactgcatcctgaaattgctgtttatcaggagaaagttattcgtgaggttaaatcaggtaaaaaagataaatataatcattgggatcttaattacgagtcaagaaaaccggaaataaccaacacaatcatagatgcaaaagtgacggcatttctgccggaaaatgtactgaccatcggaggtcaatttcagcatgcagagctccgtgatgactcagccacgggtaaaaaaacgacagaaacacagtctgtttcaattaaacagaaagctgtttttatagaaaatgaatatgcagcaacggattctctcgccctgactggaggactgcgtctcgataatcatgaaatctatggcagttactggaatccaagattgtacgctgtttataacctgaccgataatctcacactcaaaggggggatcgcaaaagcatttcgggctccttcaattcgtgaggtgagtcctggatttggaacactgacgcagggtggtgcctctattatgtatggaaacagggacctgaaaccggagaccagtgtaaccgaagagatcggtattatttatagtaatgatagtggtttttcggcgagcgcgacgctgtttaatactgattttaaaaataagttgaccagttacgatataggtacaaaagatccagtcaccgggttaaacacttttatttatgataatgtaggtgaggcaaatatcagaggggtggagcttgcaactcagattcctgtgtatgataaatggcatgtatctgcaaactatacatttactgactctcgtcgaaaaagtgatgacgaaagtctcaatggcaagtcgctgaaaggggaacctctggaaagaactcccagacatgcagccaatgcaaaactggaatgggattacactcaggatattacattttattcatctctgaattatacgggaaaacaaatctgggcagcacaaagaaatggtgctaaggttccccgcgttcgtaatggattcacatctatggatattggtctaaattaccagattctgccagacacgctgattaattttgccgttcttaacgtcacagacagaaagagcgaggatatcgataccattgatggtaactggcaggtcgatgaaggacgccgttattgggctaatgtaagagtatccttctgagagtatataaagacaacctgaggccgtgagcctcaggtaccagtgtagtaatcagtaatgtcagtttccaggttgtaatgcttttaatcttgattaaaataatcttaataatttaaacttgttaaatatcgatgattttaatttgagagcgttcagaattctgtgtcacgttaaaaattcta

SEQ ID NO: 1050 - DNA, 483 bp, Escherichia coli
atgaaaactgtttctcagaacacctgtacactttctgcttccgtagtcacagcttcagagaatgaccagcctcaactggttgccactctcgttcctcatgaacagcgcatcagcttctggccgcagcattttggcctcattccacagtgggtgaccctggaaccccgtgtcttcggctggatggaccatctttgcgaagactactgcggtggtatctggaatctgtacaccctgaacaacggcggggcatttatggcacccgaaccggatgacgatgatgacgagacatgggtactgttcaatgccatgaacggtaaccgtgctgaaatgagcccggaagccgccggcattgctgcctgtctgatgacgtacagtcatcatgcctgtcgcacggagtgttatgccatgacggttcattattaccgtctgcgggactacgccctgcagcatccggaatgcaacgccattatgcgcatcattgac

SEQ ID NO: 1051 - protein, 161 aa, Escherichia coli
MKTVSQNTCTLSASVVTASENDQPQLVATLVPHEQRISFWPQHFGLIPQWVTLEPRVFGWMDHLCEDYCGGIWNLYTLNNGGAFMAPEPDDDDDETWVLFNAMNGNRAEMSPEAAGIAACLMTYSHHACRTECYAMTVHYYRLRDYALQHPECNAIMRIID

SEQ ID NO: 1052 - DNA, 816 bp, Escherichia coli
atgcaattagccagtcgttttggtcatgtaaatcagatacgccgtgatcgtcccttaactcgtgaagaactgatgcaggtcgtccccagcgtattcggggaagataagcacacatccagaagcgagaactatacctggatccccaccatcacagtgctggaaagcctgcagcgggaaggttttcagccattcttcgcctgccagacccgtgtgcgcgacccgggccgccggggatacaccaaacacatgctgcgtctgcgccgtgacggggagataaacggacaacatgtccctgaaatcatcctgctgaactcccatgacggtacctccagctaccagatgctgccgggttacttcaggttcgtctgccagaacggatgcgtctgtggtcagtctctgggggaagtgcgtgttccacaccggggaaatgtagtggagaaagttatcgaaggggcttacgaggtggtgggggtttttgaccggattgaagaaaagcgtgacgccatgcagtcgctggtcctgccgccactggcacgccaggcgctggcacaggcggcactgacttaccgttatggtgacgaacatcagcccgtcaccaccgccgacattctgacgccgcgacgccgggaggattacggtaaggacctgtggagcgcatatcagaccatccaggagaatatgctgaaaggcgggatttccggtcgcagcgctaaaggaaaacgtatccacacccgtgccattcacagcatcgacacggacattaagctcaatcgcgcattgtgggtaatgacagaaacgctgctggagaacatgcgc

SEQ ID NO: 1053 - protein, 272 aa, Escherichia coli
MQLASRFGHVNQIRRDRPLTREELMQVVPSVFGEDKHTSRSENYTWIPTITVLESLQREGFQPFFACQTRVRDPGRRGYTKHMLRLRRDGEINGQHVPEIILLNSHDGTSSYQMLPGYFRFVCQNGCVCGQSLGEVRVPHRGNVVEKVIEGAYEVVGVFDRIEEKRDAMQSLVLPPLARQALAQAALTYRYGDEHQPVTTADILTPRRREDYGKDLWSAYQTIQENMLKGGISGRSAKGKRIHTRAIHSIDTDIKLNRALWVMTETLLENMR

SEQ ID NO: 1054 - DNA, 231 bp, Escherichia coli
atgtcggactgtcaccctgttttattgcccgaaggccctttctcacgcgaacaggcgatggctgtcacaacagcttaccgcaatgtgcttattgaagatgatcagggaacgcatttccggctggttatccacaatgctgaagggcagctacgctggcggtgctggaattttgaacctgatgccggaaaacagctaaatccatatctcgccagtgagggaattctcaggcaa

SEQ ID NO: 1055 - protein, 77 aa, Escherichia coli
MSDCHPVLLPEGPFSREQAMAVTTAYRNVLIEDDQGTHFRLVIHNAEGQLRWRCWNFEPDAGKQLNPYLASEGILRQ

SEQ ID NO: 1056 - DNA, 780 bp, Escherichia coli
atgttgaacagaaaactaaatatacggctacgtcattccctgaacagtcactgcataccttccatcattatcaataacaccgtacgttcatttcagaggtcagtcatgaataccagagctctttttcccctgctgttcactgtggcatcattctccgcctccgccggcaactgggctgtcaaaaacggctggtgtcagaccatgacggaagatggtcaggcgctggtaatgctgaaaaatggcacgattggtattaccggcctgatgcagggatgcccgaatggtgtacagacgctcctgggcagccgtatcagtattaacggtaacctgatccccacatcacaaatgtgtaatcagcagacgggattcagggctgttgaggtggaagtcggacaggcgccggaaatggtcaaaaaagccgttcactccatagcagagcgtgatgtgtccgttttacaggcatttggtgtacgaatggaattcacccgcggtgatatgctgaaggtctgtccgaaatttgtcacatcacttgctggtttttccccgaaacagacacccgccattaataaagattccgtcctgcaggctgcccggcaggcatacgcccgggaatatgacgaggaaacaacagaaaccgctgattttggctcttacgaagtaaaaggcaataaggttgagtttgaagtgttcaatcctgaagaccgtgcgtacgacaaagtgaccgtcacggttggtgctgacggtaatgccaccggtgccagcgttgaatttatcggaaaa

SEQ ID NO: 1057 - protein, 260 aa, Escherichia coli
MLNRKLNIRLRHSLNSHCIPSIIINNTVRSFQRSVMNTRALFPLLFTVASFSASAGNWAVKNGWCQTMTEDGQALVMLKNGTIGITGLMQGCPNGVQTLLGSRISINGNLIPTSQMCNQQTGFRAVEVEVGQAPEMVKKAVHSIAERDVSVLQAFGVRMEFTRGDMLKVCPKFVTSLAGFSPKQTPAINKDSVLQAARQAYAREYDEETTETADFGSYEVKGNKVEFEVFNPEDRAYDKVTVTVGADGNATGASVEFIGK

SEQ ID NO: 1058 - DNA, 678 bp, Escherichia coli
atgtctgataatcgttcccggcatgatcgcctggcggttcgcttatcactcattatcagccgactgatgaccggagaatctctgtcactaaaaacactgtcagatgaatttggcgttacagaacgtactttacagcgcgattttcatcagcgtctggttcacctggatttagagtacagaaatggcaggtacagcctcagacgacagagcagcccgggtgcgatccctgaaatgctttcttttatacagaataccgggatcgcacggatacttccgctccggaacggacgactgataacctgtcttaccgacaaccaggagccctctccctgccttatctggctaccggcgccggatatcactgcaacgttccccaagtgtttctcgcaactcatcctggcaataagacagtgtatccacatctctctgatggctgagcgatggtatccgtcactggagccctgccggctcatttattacagcggtagctggtatctgatcgcgttacagaagggaaaactgcaggtctttcctctggcagatatcaaatcagtcagcctgacatcagaacggtttgaacggagaggccacatccacagtctggtcgctgaagagcgttttatctccgccctgccacatttctctttcatccataaacttatcaacacctttaacctg

SEQ ID NO: 1059 - protein, 226 aa, Escherichia coli
MSDNRSRHDRLAVRLSLIISRLMTGESLSLKTLSDEFGVTERTLQRDFHQRLVHLDLEYRNGRYSLRRQSSPGAIPEMLSFIQNTGIARILPLRNGRLITCLTDNQEPSPCLIWLPAPDITATFPKCFSQLILAIRQCIHISLMAERWYPSLEPCRLIYYSGSWYLIALQKGKLQVFPLADIKSVSLTSERFERRGHIHSLVAEERFISALPHFSFIHKLINTFNL

SEQ ID NO: 1060 - DNA, 882 bp, Escherichia coli
atgtcattcagccattcttccctctccgcacaagtgaaatcatatctgacgtttcttcctgaagaaattcgccagaaaatccttgaacatctccacagtgttattcattacgagcccgtgattggcattatgggtaaatccggcaccggcaaaagcagcctgtgtaatgccatttttcagtcccgtatctgcgccacgcatcccctgaacggctgcacccgccaggctcatcgtcttaccctgcaactcggtgaacgcagaatgacgctggtcgatctgcccggcattggtgaaacaccgcagcatgatcaggaataccggacactttatcgtcagctgctaccggaactggatctgattatctggatcctgcgggcagatgaacgcgcgtatgccgccgacattaccatgcatcagtttttactgaatgaaggcgcagatccctcgcgttttctgtttgttctcagccatgccgatcgcgtgtttcctgctgaagaatggaatgccacagaaaaatgcccgtcccgtcagcaggcgctctcactggcgacggtgacagcccgggtggcaaccctgttcccttcatcatttccagtactctccgttgctgcacctgtcggctggaaccttccggcgtttgtgtcgctgatgatccacgcactgccaccacaggcaaccagcgcggtgtattcacatatccggggagaaaaccgctctgaacaggcccggaaacacgcacaacagacttttggtgaaaccatcgggaaaagttttgacgacgccgttgcccgtttcagttttccggcctggatgttacagcttctgcgcaaaacccgggaccgcattatccacctgctgatcacactgtgggagcgtctgttc

SEQ ID NO: 1061 - protein, 294 aa, Escherichia coli
MSFSHSSLSAQVKSYLTFLPEEIRQKILEHLHSVIHYEPVIGIMGKSGTGKSSLCNAIFQSRICATHPLNGCTRQAHRLTLQLGERRMTLVDLPGIGETPQHDQEYRTLYRQLLPELDLIIWILRADERAYAADITMHQFLLNEGADPSRFLFVLSHADRVFPAEEWNATEKCPSRQQALSLATVTARVATLFPSSFPVLSVAAPVGWNLPAFVSLMIHALPPQATSAVYSHIRGENRSEQARKHAQQTFGETIGKSFDDAVARFSFPAWMLQLLRKTRDRIIHLLITLWERLF

SEQ ID NO: 1062 - DNA, 948 bp, Escherichia coli
atggcatcactgtcgattaatacgctacgccgaatgagcatttgtaaaagtcaggcctggaaagatacccagcgaatactgaagcgtagtggacttgtgtacagaggggaacggtcagaatcgtttgatcctgagaaacattttaatcgttatacggtgcgttatctgtacctgcttaacataattgcgcttaagataaggtcggttagtaaattttcctgttggatcgaggtgggacaatgccatcgtatgactggtaaacatttatctcttaatgccccgccttttatgctgattccgcgtagtatccggagaaaagtggatggattcagacagtcaaaaggtgaagcaaccccaaaatcggctcaaccgttcacgggcagtttgtatgaggttttgagcaaggagagcgattcagctaagctggacgcatggattgctgaactgcctctgaacttgcaggaggagggaaaggaaatctcagtcatgggatttagtccacgggctgtggcccgacctgttcttcggtcagcatccccgacgtttgaactgttttatcaggagtatcaatccctaagattaaaatctgtttttaaatttgaaccaagatttgaacaacttttaacaagactgagctttagaaaacaatcaattctcagaaaacaacaatacagggttaaatcgcaattactggagagactggggaatgtgttgtttttcacgtcgctttataaccagggatgtttagaggagtttataaatgcacttgtggaaaaggaggacatttatctgaaaatgtcccctggggaggaaaaggtgaaagcacaccagaaaatggttaactacattgaagcgttctgcaacaaaatgacggaaaaatacctgatgcccgcagcaagcagacactacaaaaagaagaaaatcgctaggagcgaaagtggtgaaagt

SEQ ID NO: 1063 - protein, 316 aa, Escherichia coli
MASLSINTLRRMSICKSQAWKDTQRILKRSGLVYRGERSESFDPEKHFNRYTVRYLYLLNIIALKIRSVSKFSCWIEVGQCHRMTGKHLSLNAPPFMLIPRSIRRKVDGFRQSKGEATPKSAQPFTGSLYEVLSKESDSAKLDAWIAELPLNLQEEGKEISVMGFSPRAVARPVLRSASPTFELFYQEYQSLRLKSVFKFEPRFEQLLTRLSFRKQSILRKQQYRVKSQLLERLGNVLFFTSLYNQGCLEEFINALVEKEDIYLKMSPGEEKVKAHQKMVNYIEAFCNKMTEKYLMPAASRHYKKKKIARSESGES

SEQ ID NO: 1064 - DNA, 786 bp, Escherichia coli
atgaaacaatataaaggcggttataacgtgaatagatatgactggaaaaataaaacaactgagcatttattgaatgataataatctggcagataatcacatacctgaatggatcagaaaaaatgaaattgcagcattctggttctggttaattatgtctcatacagttcccgaaaaacttaaacttaataatgaatctgagttcaattctgccttgaagggggtgatcgttatgaaggataaccccatgacaattattccttcaagtcatgaaacacgactgaatgttatagggaaatggattaatgcgttaatcctttatggggaagcagatcggattatctcaataatgcatcaaaactggctgggactcgaaaagagaaacgaagccaaatggcttaaaaagaataccgaacaactgaaatgggcatgggaatatattgatgcacgtatctcacccacatatctttcctggtttaatcctgtaaatgataacgaaagatatattgccattgtagttttactaaaaatgttattccctacagacacaccctgtttactgacgccaaaagaatttcacctaggattcgctgcaaaagaaagatttttcgacaagatgcacaatgcattcagaaaacagtttatcgatggaaaaaaagataaacgggtacaaatcaacgtaaagatatcgccatccgcaaaaagcgctctggacagactgaccagagagcggaaaacaacacagcaggctattctggaacaactgattctgtacggtagactggat

SEQ ID NO: 1065 - protein, 262 aa, Escherichia coli
MKQYKGGYNVNRYDWKNKTTEHLLNDNNLADNHIPEWIRKNEIAAFWFWLIMSHTVPEKLKLNNESEFNSALKGVIVMKDNPMTIIPSSHETRLNVIGKWINALILYGEADRIISIMHQNWLGLEKRNEAKWLKKNTEQLKWAWEYIDARISPTYLSWFNPVNDNERYIAIVVLLKMLFPTDTPCLLTPKEFHLGFAAKERFFDKMHNAFRKQFIDGKKDKRVQINVKISPSAKSALDRLTRERKTTQQAILEQLILYGRLD

SEQ ID NO: 1066 - DNA, 885 bp, Escherichia coli
atgatgccactgctggataagctgcgtgagcagtacggggtcggaccgctatgcagcgaactgcatattgccccgtcaacgtattaccactgtcagcaacagcgacatcatccggataaacgcagtgcccgtgcgcagcgcgatgactggctgaagaaagagatacagcgcgtatacgatgaaaatcacaaggtatacggtgtgcgtaaagtctggcgtcagttgttacgggaaggtatcagagtggccagatgcactgtggcactgtctcatggcggttatgggacttgccggtgttctcggggtaaaaaggtccgtacgaccatcagccggaaagccgttgccgcaggcgaccgcgtaaaccgtcagttcgtggcagaacgacctgaccagctgtgggtggctgattttacttacgtcagcacatggcggggcttcgtctatgtggcgttcatcattgatgtgtttgccggatacatcgtggggtggcgggtctcatcgtccatggaaacgacattcgtgctggatgcactggagcaggcgttatgggcccgtcgaccgtccggcacggtccatcacagtgataaagttctcagtatgtatcgctggctacacacagcggttaaggaagccggattactggcatcaacaggaagtacaggcgactcgtatgacaacgcgatggcggagagcatcaatggtcttaacaaagcggaggtaatacaccgtaagagctgggaaaaccgtgcagaagtggaactggccacactcacgtgggtggactggtataacaatcgacgattgctggaaaggctgggccatactcctccggcagaagcagaaaaagcttattatgcttccatcggaaacgatgatctggcagcc

SEQ ID NO: 1067 - protein, 295 aa, Escherichia coli
MMPLLDKLREQYGVGPLCSELHIAPSTYYHCQQQRHHPDKRSARAQRDDWLKKEIQRVYDENHKVYGVRKVWRQLLREGIRVARCTVALSHGGYGTCRCSRGKKVRTTISRKAVAAGDRVNRQFVAERPDQLWVADFTYVSTWRGFVYVAFIIDVFAGYIVGWRVSSSMETTFVLDALEQALWARRPSGTVHHSDKVLSMYRWLHTAVKEAGLLASTGSTGDSYDNAMAESINGLNKAEVIHRKSWENRAEVELATLTWVDWYNNRRLLERLGHTPPAEAEKAYYASIGNDDLAA

SEQ ID NO: 1068 - DNA, 324 bp, Escherichia coli; identical to SEQ ID NO: 530

SEQ ID NO: 1069 - protein, 108 aa, Escherichia coli; identical to SEQ ID NO: 531

SEQ ID NO: 1070 - DNA, 234 bp, Escherichia coli
atgattaactggccctggtgttttttctcagtgcaaggtgattatctttatcataaggctcttttcagaaaaagcgtgatgattggttctggtgttttgattcagatgagatttacgttatcgatggttaatcgtttttatggtgtgttgaaaagtaacgttttcaggataagaaaatcgattctgatattggtgaactttgttcttgtggcagagttatctgtaaacaggttt

SEQ ID NO: 1071 - protein, 78 aa, Escherichia coli
MINWPWCFFSVQGDYLYHKALFRKSVMIGSGVLIQMRFTLSMVNRFYGVLKSNVFRIRKSILILVNFVLVAELSVNRF

SEQ ID NO: 1072 - DNA, 738 bp, Escherichia coli
atgaatcaaccaatacacaatgcttactggttatcccgttttgacatccttctcgacagtgccctggcgcagcaccgtgccgtctcgttaatccgagtggatttacgtttccctgagtatatgcctgtcaccatcatggatcccgatccggattcagcggtgatttctcgtttttttgcatccctgaaagccaaaattcaggcttaccagcggaaaaaaagatgtgccaatcagcgtgtgcatgcaaccagcctgcgttatttctggtgccgggagttcggcaagatgtatggcaggaaacattatcacgtgatattactgctcaacaaagatacctggtgctcgatcggggatttcagcgaaccgtcttcgctggcgacgatgatccaggaggcatggtgcagcgccctgcatcttgagccctggcaaggcgatggcctggtccatttttccaggtggacgccttcccgtaaaccagcatcgtctgatgctcgcccttcttccgatgacacgcctttgtcgggtggatgttctgatacctggaaggcttcagacaaaaagccgggtgaagccgctgttctctggatcaagcgtggtgatgtgggagcgctgcagaaagcccggaacagagccagttatctcgtaaaatatgaaacgaagttgcataacggttccgggcaacgtaattatggttgcagtcgtgggccgggacgtctactggatggcaggagaagcctg

SEQ ID NO: 1073 - protein, 246 aa, Escherichia coli
MNQPIHNAYWLSRFDILLDSALAQHRAVSLIRVDLRFPEYMPVTIMDPDPDSAVISRFFASLKAKIQAYQRKKRCANQRVHATSLRYFWCREFGKMYGRKHYHVILLLNKDTWCSIGDFSEPSSLATMIQEAWCSALHLEPWQGDGLVHFSRWTPSRKPASSDARPSSDDTPLSGGCSDTWKASDKKPGEAAVLWIKRGDVGALQKARNRASYLVKYETKLHNGSGQRNYGCSRGPGRLLDGRRSL

SEQ ID NO: 1074 - DNA, 216 bp, Escherichia coli
atgtatctgcttccattctcatgttcatatttcaccttacgctttcactatctgttattggaagtaccgatttattttggtgctgctcacttacggtcattcacggaagaggatggtggtgaaccgtacgatcctggctgctggcgagggaaggttcaggactgggatggagcaggtttagtggtggaagatgagtcggaatttctgactggtcag

SEQ ID NO: 1075 - protein, 72 aa, Escherichia coli
MYLLPFSCSYFTLRFHYLLLEVPIYFGAAHLRSFTEEDGGEPYDPGCWRGKVQDWDGAGLVVEDESEFLTGQ

SEQ ID NO: 1076 - DNA, 2046 bp, Escherichia coli
atgaagaacaaatatatcattgctccgggcattgccgtgatgtgttctgcagttatatcatcaggttatgccagttctgataaaaaagaagatacgcttgttgttactgcctccgggttcactcagcagctcagaaatgccccggccagtgtctcagtcattacttcagaacaactgcaaaaaaaaccggtttcagatctggtcgatgcagtaaaagatgttgaagggattagtatcactggtgggaatgaaaaaccggatatcagtatacgtggtctaagtggcgattacacgctgattctggtcgatggacgacgtcagagcggtcgggaatccagaccaaacggcagcggcggttttgaagccggatttatccctcctgtggaagcaattgaacgcattgaagtgatccgtggccctatgtcttccctgtatggttctgatgccatcggaggggtcattaatatcataaccaaaccagttaataaccaaacatgggatggcgtacttggacttggggggattattcaggaacatgggaaatttggtaactcaaccacaaatgacttctatctgtcaggcccattgattaaggataaacttggtcttcagctatatggaggaatgaactatcgcaaggaagatagtatctctcagggaacaccggcaaaagataataagaatataacggcaacgctccagtttactccgactgaaagccagaagtttgtttttgaatatggaaaaaataaccaggtgcatacattaacacctggtgagtctctcgatgcctggactatgcggggaaatcttaaacaaccaaacagtaaaagagaaacgcataattcacgtagtcactgggtagcagcatggaatgcccagggcgaaatactgcatcctgaaattgctgtttatcaggagaaagttattcgtgaggttaaatcaggtaaaaaagataaatataatcattgggatcttaattacgagtcaagaaaaccggaaataaccaacacaatcatagatgcaaaagtgacggcatttctgccggaaaatgtactgaccatcggaggtcaatttcagcatgcagagctccgtgatgactcagccacgggtaaaaaaacgacagaaacacagtctgtttcaattaaacagaaagctgtttttatagaaaatgaatatgcagcaacggattctctcgccctgactggaggactgcgtctcgataatcatgaaatctatggcagttactggaatccaagattgtacgctgtttataacctgaccgataatctcacactcaaaggggggatcgcaaaagcatttcgggctccttcaattcgtgaggtgagtcctggatttggaacactgacgcagggtggtgcctctattatgtatggaaacagggacctgaaaccggagaccagtgtaaccgaagagatcggtattatttatagtaatgatagtggtttttcggcgagcgcgacgctgtttaatactgattttaaaaataagttgaccagttacgatataggtacaaaagatccagtcaccgggttaaacacttttatttatgataatgtaggtgaggcaaatatcagaggggtggagcttgcaactcagattcctgtgtatgataaatggcatgtatctgcaaactatacatttactgactctcgtcgaaaaagtgatgacgaaagtctcaatggcaagtcgctgaaaggggaacctctggaaagaactcccagacatgcagccaatgcaaaactggaatgggattacactcaggatattacattttattcatctctgaattatacgggaaaacaaatctgggcagcacaaagaaatggtgctaaggttccccgcgttcgtaatggattcacatctatggatattggtctaaattaccagattctgccagacacgctgattaattttgccgttcttaacgtcacagacagaaagagcgaggatatcgataccattgatggtaactggcaggtcgatgaaggacgccgttattgggctaatgtaagagtatccttc

SEQ ID NO: 1077 - protein, 682 aa, Escherichia coli
MKNKYIIAPGIAVMCSAVISSGYASSDKKEDTLVVTASGFTQQLRNAPASVSVITSEQLQKKPVSDLVDAVKDVEGISITGGNEKPDISIRGLSGDYTLILVDGRRQSGRESRPNGSGGFEAGFIPPVEAIERIEVIRGPMSSLYGSDAIGGVINIITKPVNNQTWDGVLGLGGIIQEHGKFGNSTTNDFYLSGPLIKDKLGLQLYGGMNYRKEDSISQGTPAKDNKNITATLQFTPTESQKFVFEYGKNNQVHTLTPGESLDAWTMRGNLKQPNSKRETHNSRSHWVAAWNAQGEILHPEIAVYQEKVIREVKSGKKDKYNHWDLNYESRKPEITNTIIDAKVTAFLPENVLTIGGQFQHAELRDDSATGKKTTETQSVSIKQKAVFIENEYAATDSLALTGGLRLDNHEIYGSYWNPRLYAVYNLTDNLTLKGGIAKAFRAPSIREVSPGFGTLTQGGASIMYGNRDLKPETSVTEEIGIIYSNDSGFSASATLFNTDFKNKLTSYDIGTKDPVTGLNTFIYDNVGEANIRGVELATQIPVYDKWHVSANYTFTDSRRKSDDESLNGKSLKGEPLERTPRHAANAKLEWDYTQDITFYSSLNYTGKQIWAAQRNGAKVPRVRNGFTSMDIGLNYQILPDTLINFAVLNVTDRKSEDIDTIDGNWQVDEGRRYWANVRVSF

SEQ ID NO: 1078 - DNA, 5307 bp, Escherichia coli
  misc_feature (14)..(14): unknown
  misc_feature (29)..(29): unknown
  misc_feature (88)..(88): unknown
  misc_feature (363)..(363): unknown
  misc_feature (1824)..(1824): unknown
accgtcagcaaaanctggmgacgctgtgncggtagcaccggatccactggcagatagaccgcacccagtcgtaaaatrccgtgtacgncggcaatctgctgccagcctttttccatcaccaccgccacgcggtcgccatrctgcacgcccagcgctaacagggcgcgggccacatgatccgccgccgtcgacagttggcgataggtcaattcacggataggactgatcagcgcagtttcctgtggcgtcagtgctgcctgacgcagtaacccatggtgcaacaaggccgtaggtgcaggagcctgcgtgaccggtgcactaacggtgggcagcagccagcacatcttgagtctcatgccagangctgtggtcgctgggctagggcgtgcaggagttggcaataacactggaacatctgatccattagcgccggttcaaacaattgttccaccacgtcccaattaaagtgcaattccccgttacgctccattacctgatgatcgagccacacctgcggtgtctgtgaaatactgtacagatcatcctgcggttggttgaacagcgtatcatccgtttcccagctcgcctcatattgattgagcaagctggtgaacacgataggaatcaccgatttcgccggatcgcggtgagtttgtaccagcagtcgagagacctggataccgccaaacaagcggttatccaaatcgcgccacagttgagagtggatcacgtttgcccgcgcctgcaaggtttctccctgcgacatatcaatctccagcaacgtcagtgcagtaaaatcgccaattaagtgattgatatctgcgtgcaacggcagacgattaaacagcgtcaggttaaggctaaagtgcggcgaggaactaaagcgcgccaacacctgagcaaaccccgtgagcagcagtgtagtaggcgtgatactcatctgacccgcctgcgttttcaagcgctgccagatagcacgagatagacaatagctacggcgcacgaatgtggggttttccagcttcgtggggtcggtacgcagcggcaatcgtggccccggcggcagagtttcgatgcgggcgcgccagtagtcacgtgcccgttcaaactgcggcgttttctcgtaggattttaaggtcagcacatagtcgcggaaactgtacgtcaatgtaggcaatgccgcctgcggatggcggtagtgataagctagttcccgaatgaacaactccagactccatgcatcggctatcagcaggtcgatagatacatgtagccgggctttttgctgcggatcaaccacgacctccatctgaaacagaggccagcgactacaatcaatcatctgatgtgagagggtgtcacgcagctcacggcaacgctgttgaaacgcatcctcgcactgggtggtatagaaggcaacgtggtattccggcacgtttggcaatatctgctgcataccgtcatcgttgacaattgcacgcaacatgctgtgccgcgcaatcaccgcattgagcgcgcggttgaacgctgtttcatctagcccctgtagttcatattccacatagatatgggtggaaatattgcccaatcccaaggattttcgccgcccaacccaataggcctgttgcacgtcagtcagcggaaaaggtaggtgctgctggtcaggggcaaagaccgtatcaggcaatgctgaaaccgctgtctcactgccgccttgttcgagcagatagcaacttaatccctcgatggtgggatcggcaaagaatgcgcttagcgtacaggtgatgccgtaacgttgctgaatatcatataaaatggttgacngctaacagcgaatgcccacccagttcgaagaagctggcgtggtgatcatcaatgctgacaccaagcgtgcgttcccatatctccgtcaccactgcaataatatcggattttgttgcgcgggataagagattattcgacgattcgtgggagaacgtggcaggccgtacggcctcgacccaatagcgctgcggtgtaaaaacggtccccggcagggcgatgcgttgactgcccaacatacgctccgccgcatccaacccagcgccaatctaggctgacgccagccaaccataactgccctaacgcctctagcgcggtgcgattggcatcactcgccgcgtcgtccagcatcaaagagcagacatcgggctgcaagaggggattcgtcggcacatcatcaaacggttggcccgcattcaacctgtgccatgcttgctctagtgtgcagtctcctcgtagtacggcggcagcatagccaccatcaccgtcgccgcatagcaccacattcaacgtttcccgttcgtcaatcaacgcgatcagcgcatactggctgataaacgtccgttgcgcaggggagagatcttgcagacaggctggttcgagcggaaaatgctcgagcagttgtcccaccgcctgtgacaacacctcagagcacgccagccagtcactaagcgtctcgagtgcaacaacgaaacggtgccccaatctccagtagatcgtgcaacccgtggttgcctccaccatcggtgcgtcgcggagttgtcgggctagctgggtgcaattctctgcgatgacacacttacgtaccggggcggagaaacgcccgtgacgcagggtgtaagccacgtcctgtaagcgtatctctggatgtgcggccagtttcgccagcagggcgttttgcatctgttccagggcattgtggttttttgccgagagtacaacgacacaaggccccatctgctgcgccctcgcctgcggcgtcgataacggcgcttgtaccaccagatgtgcgttggtgccgcccaatccgaacgcactcacaccagcggtgcgtggcgtggtgccctccggccaaggcgttaaacgggacaccacttcaaacgggctgtcctccaaccccagttgcggattagcccgttgaaaattcagcgtagggtaaaacacccggttagtaagactcagcaccgtttttatgagactggtgatgccagatgccatttctacgtgacccacgttaggtttcacagcccccagacgccacggtgtcgcattcggcgctggcgtcccaaacacacgtttgatggccgcgaattcgatagcgtcacccaacggcgtgccgctgccatgcagttctagatactgaatttgctgcggcgtcacctccgccaagctatgcgcctcaatcatcacagcttcctgaccatcaacacccggcacggtataaccactgcgcgcaccgccatcattgttgatggcgcttcccttgatgacggcaaggatgttatccccttgcacctgcgcgtctgtagcccgtttgagcagcaccatgcccaaaccactgctgtagaccgtaccgctcgcctgcgcatcaaaagtatgaatcaggccatcctctgcttgcagcccatcaccgtgcgattcatagctgcgctgctcctccatgcgaaacgtgacgccacccgctagcgccatatcgcactgaccgctcagcagcccttcgcaggccagatgcactgccaccagcgaggtggcacaactggcctgaaccgtcacgcaagggccggtaatattcaggcggtaagccagttgggacgtcaaatgatctttgtcattgccgaccatgatttggagaccaccgagttgtgcaagcttgtctgggttgttcatcaggtgagtaagcaaatagaagctggtactcacgcccgcatataggccgacgcgcgcatcgtgctgcttcgggttgtaaccgctttgttcaaacatctcccaagcacaggtcagaaatacgcgctgctgtggatccatgatttctgcttctgcacggctgtagccaaaaaagttggcatcgaactccgccatgtgctcatagacgttgttcagcgtaatgtgattgtggccgttgctcggggtcactttggggtccaaaatgttgcatccggtgcgaagcaccgtttcgaatgccgcaacgctgtgcacgccggggtaccggcagttcatgccaacaatggcaatatcgctttcactgtaagtcattagtttttccttaacgctgacgctggtgacgacgtacaagtcgttgctgggcgcgggatcgggaagcatcacgctgctgtgtttgattcaccgcccgtgcattgtcctgcatagcctgcaaataaccggcaattcttttcacggtggttaagcgaaatagctcagcaataggtaccgtaaccttaaaaatctcctcaatacggcgatgcaacagcacgatctggattgagccgccccccgcttcaaaaaagttgtcattcagtccgatctgttctcgttgtagtacctcgcaccagagagcggccacctgctgttcatagggcgaggcgtgcgcgagggccctcgacttctgtgatgtagattgcgacatacgttggataacctcttgaaccattgccgcctgatcaattttgccgttgcctgtcatcggcagcaccttgagaagaaagaaatgttggggcagcaggtaatacggcaactgcacggctaactgagcacgaacacgcgctaacagggcgtcagtatcgtcaggatgcaggttttctgcggcagtgataaaggcatacagctgtccctggtggcacaccacggcggcactccctacgctgtcgagctgttcaaggtggcttttgacttcccccagttcgatacggtaaccattcaccttcacttgggtatcgttgcgccccaaaaaggcgacttgcccgtcagcaaagtagcgcccgcgatccccagtgcggtaaattcgctcaccactcgcttcgcgccagacaaagctcgccgccgttttctctgcgtcgttcaggtagccttgtgccagccccatcccgccaatgcaaatctctccttccaccccgaccggacattcctccagttgcgcatttagcacgtatactggctggttgcgcaggccccgaccgtagggaatactggtccacgtcgattccacctcacctatcgggtagtagaccgaccagatggcgcactcggtcgctccacccagactgatgatgtccatcgtttcattgagccgctcgcgcatctgctccggtaacgttagcgggatccagtcgccgctcaacagtgccagacgcaacgtcggataactcatccgatcgccgctgtggtattcgcacagcatctgcatcagtgcgggcactgcattccagacgcttacatgaccgtgtgccataactgtctgccaatgacgcggatctttttcccgtcttgctt

SEQ ID NO: 1079 - DNA, 1706 bp, Escherichia coli
ctgctcgaacaaggcggcagtgagacagcggtttcagcattgcctgatacggtctttgcccctgaccagcagcacctaccttttccgctgactgacgtgcaacaggcctattgggttgggcggcgaaaatccttgggattgggcaatatttccacccatatctatgtggaatatgaactacaggggctagatgaaacagcgttcaaccgcgcgctcaatgcggtgattgcgcggcacagcatgttgcgtgcaattgtcaacgatgacggtatgcagcagatattgccaaacgtgccggaataccacgttgccttctataccacccagtgcgaggatgcgtttcaacagcgttgccgtgagctgcgtgacaccctctcacatcagatgattgattgtagtcgctggcctctgtttcagatggaggtcgtggttgatccgcagcaaaaagcccggctacatgtatctatcgacctgctgatagccgatgcatggagtctggagttgttcattcgggaactagcttatcactaccgccatccgcaggcggcattgcctacattgacgtacagtttccgcgactatgtgctgaccttaaaatcctacgagaaaacgccgcagtttgaacgggcacgtgactactggcgcgcccgcatcgaaactctgccgccggggccacgattgccgctgcgtaccgaccccacgaagctggaaaaccccacattcgtgcgccgtagctattgtctatctcgtgctatctggcagcgcttgaaaacgcaggcgggtcagatgagtatcacgcctactacactgctgctcacggggtttgctcaggtgttggcgcgctttagttcctcgccgcactttagccttaacctgacgctgtttaatcgtctgccgttgcacgcagatatcaatcacttaattggcgattttactgcactgacgttgctggagattgatatgtcgcagggagaaaccttgcaggcgcgggcaaacgtgatccactctcaactgtggcgcgatttggataaccgcttgtttggcggtatccaggtctctcgactgctggtacaaactcaccgcgatccggcgaaatcggtgattcctatcgtgttcaccagcttgctcaatcaatatgaggcgagctgggaaacggatgatacgctgttcaaccaaccgcaggatgatctgtacagtatttcacagacaccgcaggtgtggctcgatcatcaggtaatggagcgtaacggggaattgcactttaattgggacgtggtggaacaattgtttgaaccggcgctaatggatcagatgttccagtgttattgccaactcctgcacgccctagcccagcgaccacagctcgcaatgagactcaagatgtgctggctgctgcccaccgttagtgcaccggtcacgcaggctcctgcacctacggccttgttgcaccatgggttactgcgtcaggcagcactgacgccacaggaaactgcgctgatcagtcctatccgtgaattgacctatcgccaactgtcgacggcggcggatcatgtggcccgcgccctgttagcgctgggcgtgcagggcgaccgcgtggcggtggtgatggaaaaaggctggcagcagattgccgtacacattttacgactgggtgcggtctatctgccagtggatccggtgctaccgcagcgtcagttgctgacggt

SEQ ID NO: 1080 - protein, 568 aa, Escherichia coli
LLEQGGSETAVSALPDTVFAPDQQHLPFPLTDVQQAYWVGRRKSLGLGNISTHIYVEYELQGLDETAFNRALNAVIARHSMLRAIVNDDGMQQILPNVPEYHVAFYTTQCEDAFQQRCRELRDTLSHQMIDCSRWPLFQMEVVVDPQQKARLHVSIDLLIADAWSLELFIRELAYHYRHPQAALPTLTYSFRDYVLTLKSYEKTPQFERARDYWRARIETLPPGPRLPLRTDPTKLENPTFVRRSYCLSRAIWQRLKTQAGQMSITPTTLLLTGFAQVLARFSSSPHFSLNLTLFNRLPLHADINHLIGDFTALTLLEIDMSQGETLQARANVIHSQLWRDLDNRLFGGIQVSRLLVQTHRDPAKSVIPIVFTSLLNQYEASWETDDTLFNQPQDDLYSISQTPQVWLDHQVMERNGELHFNWDVVEQLFEPALMDQMFQCYCQLLHALAQRPQLAMRLKMCWLLPTVSAPVTQAPAPTALLHHGLLRQAALTPQETALISPIRELTYRQLSTAADHVARALLALGVQGDRVAVVMEKGWQQIAVHILRLGAVYLPVDPVLPQRQLLT

SEQ ID NO: 1081 - DNA, 3348 bp, Escherichia coli
gcaagacgggaaaaagatccgcgtcattggcagacagttatggcacacggtcatgtaagcgtctggaatgcagtgcccgcactgatgcagatgctgtgcgaataccacagcggcgatcggatgagttatccgacgttgcgtctggcactgttgagcggcgactggatcccgctaacgttaccggagcagatgcgcgagcggctcaatgaaacgatggacatcatcagtctgggtggagcgaccgagtgcgccatctggtcggtctactacccgataggtgaggtggaatcgacgtggaccagtattccctacggtcggggcctgcgcaaccagccagtatacgtgctaaatgcgcaactggaggaatgtccggtcggggtggaaggagagatttgcattggcgggatggggctggcacaaggctacctgaacgacgcagagaaaacggcggcgagctttgtctggcgcgaagcgagtggtgagcgaatttaccgcactggggatcgcgggcgctactttgctgacgggcaagtcgcctttttggggcgcaacgatacccaagtgaaggtgaatggttaccgtatcgaactgggggaagtcaaaagccaccttgaacagctcgacagcgtagggagtgccgccgtggtgtgccaccagggacagctgtatgcctttatcactgccgcagaaaacctgcatcctgacgatactgacgccctgttagcgcgtgttcgtgctcagttagccgtgcagttgccgtattacctgctgccccaacatttctttcttctcaaggtgctgccgatgacaggcaacggcaaaattgatcaggcggcaatggttcaagaggttatccaacgtatgtcgcaatctacatcacagaagtcgagggccctcgcgcacgcctcgccctatgaacagcaggtggccgctctctggtgcgaggtactacaacgagaacagatcggactgaatgacaacttttttgaagcggggggcggctcaatccagatcgtgctgttgcatcgccgtattgaggagatttttaaggttacggtacctattgctgagctatttcgcttaaccaccgtgaaaagaattgccggttatttgcaggctatgcaggacaatgcacgggcggtgaatcaaacacagcagcgtgatgcttcccgatcccgcgcccagcaacgacttgtacgtcgtcaccagcgtcaggttaaggaaaaactaatgacttacagtgaaagcgatattgccattgttggcatgaactgccggtaccccggcgtgcacagcgttgcggcattcgaaacggtgcttcgcaccggatgcaacattttggaccccaaagtgaccccgagcaacggccacaatcacattacgctgaacaacgtctatgagcacatggcggagttcgatgccaacttttttggctacagccgtgcagaagcagaaatcatggatccacagcagcgcgtatttctgacctgtgcttgggagatgtttgaacaaagcggttacaacccgaagcagcacgatgcgcgcgtcggcctatatgcgggcgtgagtaccagcttctatttgcttactcacctgatgaacaacccagacaagcttgcacaactcggtggtctccaaatcatggtcggcaatgacaaagatcatttgacgtcccaactggcttaccgcctgaatattaccggcccttgcgtgacggttcaggccagttgtgccacctcgctggtggcagtgcatctggcctgcgaagggctgctgagcggtcagtgcgatatggcgctagcgggtggcgtcacgtttcgcatggaggagcagcgcagctatgaatcgcacggtgatgggctgcaagcagaggatggcctgattcatacttttgatgcgcaggcgagcggtacggtctacagcagtggtttgggcatggtgctgctcaaacgggctacagacgcgcaggtgcaaggggataacatccttgccgtcatcaagggaagcgccatcaacaatgatggcggtgcgcgcagtggttataccgtgccgggtgttgatggtcaggaagctgtgatgattgaggcgcatagcttggcggaggtgacgccgcagcaaattcagtatctagaactgcatggcagcggcacgccgttgggtgacgctatcgaattcgcggccatcaaacgtgtgtttgggacgccagcgccgaatgcgacaccgtggcgtctgggggctgtgaaacctaacgtgggtcacgtagaaatggcatctggcatcaccagtctcataaaaacggtgctgagtcttactaaccgggtgttttaccctacgctgaattttcaacgggctaatccgcaactggggttggaggacagcccgtttgaagtggtgtcccgtttaacgccttggccggagggcaccacgccacgcaccgctggtgtgagtgcgttcggattgggcggcaccaacgcacatctggtggtacaagcgccgttatcgacgccgcaggcgagggcgcagcagatggggccttgtgtcgttgtactctcggcaaaaaaccacaatgccctggaacagatgcaaaacgccctgctggcgaaactggccgcacatccagagatacgcttacaggacgtggcttacaccctgcgtcacgggcgtttctccgccccggtacgtaagtgtgtcatcgcagagaattgcacccagctagcccgacaactccgcgacgcaccgatggtggaggcaaccacgggttgcacgatctactggagattggggcaccgtttcgttgttgcactcgagacgcttagtgactggctggcgtgctctgaggtgttgtcacaggcggtgggacaactgctcgagcattttccgctcgaaccagcctgtctgcaagatctctcccctgcgcaacggacgtttatcagccagtatgcgctgatcgcgttgattgacgaacgggaaacgttgaatgtggtgctatgcggcgacggtgatggtggctatgctgccgccgtactacgaggagactgcacactagagcaagcatggcacaggttgaatgcgggccaaccgtttgatgatgtgccgacgaatcccctcttgcagcccgatgtctgctctttgatgctggacgacgcggcgagtgatgccaatcgcaccgcgctagaggcgttagggcagttatggttggctggcgtcagcctagattggcgctgggttggatgcggcggagcgtatgttgggcagtcaacgcatcgccctgccggggaccgtttttacaccgcagcgctattgggtcgaggccgtacggcctgccacgttctcccacgaatcgtcgaa

SEQ ID NO: 1082 - protein, 1116 aa, Escherichia coli
ARREKDPRHWQTVMAHGHVSVWNAVPALMQMLCEYHSGDRMSYPTLRLALLSGDWIPLTLPEQMRERLNETMDIISLGGATECAIWSVYYPIGEVESTWTSIPYGRGLRNQPVYVLNAQLEECPVGVEGEICIGGMGLAQGYLNDAEKTAASFVWREASGERIYRTGDRGRYFADGQVAFLGRNDTQVKVNGYRIELGEVKSHLEQLDSVGSAAVVCHQGQLYAFITAAENLHPDDTDALLARVRAQLAVQLPYYLLPQHFFLLKVLPMTGNGKIDQAAMVQEVIQRMSQSTSQKSRALAHASPYEQQVAALWCEVLQREQIGLNDNFFEAGGGSIQIVLLHRRIEEIFKVTVPIAELFRLTTVKRIAGYLQAMQDNARAVNQTQQRDASRSRAQQRLVRRHQRQVKEKLMTYSESDIAIVGMNCRYPGVHSVAAFETVLRTGCNILDPKVTPSNGHNHITLNNVYEHMAEFDANFFGYSRAEAEIMDPQQRVFLTCAWEMFEQSGYNPKQHDARVGLYAGVSTSFYLLTHLMNNPDKLAQLGGLQIMVGNDKDHLTSQLAYRLNITGPCVTVQASCATSLVAVHLACEGLLSGQCDMALAGGVTFRMEEQRSYESHGDGLQAEDGLIHTFDAQASGTVYSSGLGMVLLKRATDAQVQGDNILAVIKGSAINNDGGARSGYTVPGVDGQEAVMIEAHSLAEVTPQQIQYLELHGSGTPLGDAIEFAAIKRVFGTPAPNATPWRLGAVKPNVGHVEMASGITSLIKTVLSLTNRVFYPTLNFQRANPQLGLEDSPFEVVSRLTPWPEGTTPRTAGVSAFGLGGTNAHLVVQAPLSTPQARAQQMGPCVVVLSAKNHNALEQMQNALLAKLAAHPEIRLQDVAYTLRHGRFSAPVRKCVIAENCTQLARQLRDAPMVEATTGCTIYWRLGHRFVVALETLSDWLACSEVLSQAVGQLLEHFPLEPACLQDLSPAQRTFISQYALIALIDERETLNVVLCGDGDGGYAAAVLRGDCTLEQAWHRLNAGQPFDDVPTNPLLQPDVCSLMLDDAASDANRTALEALGQLWLAGVSLDWRWVGCGGAYVGQSTHRPAGDRFYTAALLGRGRTACHVLPRIVE

SEQ ID NO: 1083 - DNA, 6921 bp, Escherichia coli
  misc_feature (1)..(1): unknown
  misc_feature (74)..(74): unknown
  misc_feature (132)..(132): unknown
  misc_feature (138)..(138): unknown
  misc_feature (170)..(170): unknown
naagttcaacccatttggggattttatcaaccagccccttttaccgattggaaacaagtggcaggcccaggggnaattggtttcttggagcctgagaggtgtgggtattttaccgggggggattacgggcantctgcnggcaatatgatttaaaatcaattcaatagttngggggccattgggggactcaacagggtagctttcgttaatactgaccagcgaggtatgtatatacgaaataccggatgaaatgagccgatcaaggagtttataagtatcctctatccgcagcccccctgttacagattcttcaggagatattctgtaaccgatagcaaagggctttgtcgcatattcatagactacattttttacttcctgtaatacggccagcgggaagcgcatacgtccttcaagatctcctccccatcggtcattacgctggttaaatagaggggagaagaaattctgcagaaggaatccgtgcgcaccatgaagttcaacgccatcaaaacctgctttaatcgccctttttgtgacatctccgaatgctctaatggtttcctgaatttcgttttcagtcatttccctgctttgtaccactctcttcataaagtcaccagattttacgcttgatgcgctggcactaataacatcgttatttggcacaagctccgggatggctttattaccggcgtggaaaatctgcaaaatagccggagcaccgccacttttggctgcagctgctaacttttcaaggctgttaatgaaacggtcgtcatacgcggcaaattcatgagtaaacccaatgccgcttggcgtgacataggtacatcctgttattactaaaccaacattttgtgagcgacgtttataaaattcgagttcttgctcagagatggttccatcaggattagctgaccaggttgtcataggagccataacgatacgattacgtagctttattttttctgtcagcataaaaggagaaaacaatgatgggtgtttatttgtcataacaatacctcaaatgtttatctgattttaatgcgtataatcttaataagttgagttgctgctttttgatgcttttttctttaatagaattctttttgagtaatttcattattgtcgtgtagtcaataaaggataaatgtcagggagataatgaatctccctgcaaggttattacaaatgtgttttgtaaaaaggaattaatttatcgagcgcctgtttcacaggttctggcttatcatacaggtcgtaatgtgaataaccttcaaccacgaccagttctttatgttttgaggctgcacgaccaataatttcgcagccgtcacgataggcaccaaaagcgcccactctatcgcccactacaaccattagtggttgagttaacaggacttctgcaagatgaaaagcatcccagcccacggcaacagtctgatgtgaaaatagcgaacgatttaccccattaggcgcacagcctcgtggcgaacgataatattctgttgcttcaaaaaggtctatttctgttaatcccgcttcaagagctgcttccggagaagaagggagcaaatcatctacgcgaagttttgcgccgttagcttcgtctgttctttgttgcgccattgcttcgagtgctccgataggattaaacgctgtaaatccctcacgcataagacgcccgtagtttgcacccgtgacagtaccaatggctttaatccgacgttctgtcattgcggcattaatggcatatccacctccaccacaaatacccagtacaccaatacgcccggcatcaacgtaaggtaaggtggtaaggtaatcaacgacaatgctgaagtcttttactcgcattgttggatcttccagataacgcggttctccaccgctgcttccctgaaaactggcatcaaaagcaatgacgataaagccagcttttgccagggcggcaccatacacactacccgatgtctgttctttgcagcttccaattggatgggcactgataatggcaggatactttttttcactattaaaatcgtcagggaaatagatatcagcagctatatcccagtaagtgtgttttatcgaaacagttttcatttcaagctccagggatttgcctaaacagatttaaatatcatttctattatccgcaactggcattcgtgttcatatcgcgaacggcgtaatagtatgacttgtattggttatcatcaatggtctaatatctatcacagtgttaagttaaggtttacaatgatgaaaatagagccttcaattttgccttctcttgcctggtttgcgctgattgttcgtgccggcagtttttccagagcagcctctgaaatgggtattacgcgggccgcattgtcccagaatttaaaatctcttgaggaacgtcttaacaccaagctgatataccgtacgacccgcaatatgtcgcttactgaggaaggacagcatctgtatgaagtgctggtgtcggctttggggcaaattgatgatgcgttgaaagatgtcggtgatacccaacttgaacctacaggactgttgagaataaattcctcccgtgttgcagcaaggatgcttgttgaacctcatattggcgagtttcttactcgttaccccaaaacaaagatagaactcattatggatgacggtttatctaacattattgcggacggctgtgatgtgggcatacgtcttgagcaaggactggatgagcatatgactgccgttcctgtttctccgcttattaaactggttactgtggcatcgccagattatttaaaagaacacggtattcctgaaactcctcaggaattgagtaaccataattgtcttcggttgcggcataaaagtagcggtgcactctcagcatgggagttttcgaatgttgtggggggtaatgaagagttcgaaatagaggtgtcaggtaagtatatttctaatgatgacgaaagcatgatacgaatggcgctgaatggaacgggtatcattcaacatctggattttgcaatcgctgaacatatcaatgcgggcaagttacagccgattcttgaggattgggccgtttcatttcctggattttatatatatgtttcatcacgggtgagaatgccctctaaagttcgtgcttttattgattttatggtggagaaaagagtaaaaatagaaagttaatgatgtgtgtcagaatatcggtaagaagaatggcgcaatcgtgaggatacgtttattcataataaatctcctgaaagtttagaattattttcgatacagccagattatcattgttactaataatgtggttaaaataatagcatctatgccccccttcatgagtgtctgtgaagaggatgcttctacaaggaaatcgccaatgctcaaagaaaacttcaacgaactgcaaatctttcttgtggtggcaagagagcgaagttttaccaaagcagcgggcaaactcggcgtctctcagtctgcacttagccatgcaatgaaggctctggaggaaaggctcaatatccgcctcctgacacggactacccgcagtgtggctcccacagaagcgggggagagaatcattgcctgccttgaaccgcgtattgacgagcttgaacaggaactggaatcacttattcaattgaacggcatgccctccgggaatattcggttatctgccggggaacatgccgcgcgaagtctggtctggccgaagctaaaaccttttctcagagagtatcccgaaatcaatgtcgaactggtggtggataatggttttgtcgatattgttgaaggccgttttgatgccgggatacgactgggtgaaaatgttgataaagatatggttgcagtcaggattggaccagatatgcggatggctgtggtgggagctccggcgtattttgctgcaaaccctgcgcctgaaacgcctcatgagctacaaaatcatcgctgcatcaacatgcgtttgccaactgccggtgggctttaccactgggagttcgagcgagaagggaaaccgcttcgcgttaaggttgatgggcaactgacgtgtagtccattgccagaaagaattgatgccgcgttatcagggtttgggatcgcttgtgtccctgaagacatggttcaggagtatatagagtcaggcaagcttattcaggtgttacaggagtggtgtccaacttttcctgggtattatctttactaccccagccgcaagcagcatccgccagcttttgcgttgttgatcgatgcgcttcgctacaccgaataacgggtcctttatcctggacccgtttgggtattagcggcctacgcgtgcctgatgttcaggcgagtaacgttcaccgacgattttaattgtttccagcgcctcgcttatctgctgcgtatctttctgcgaaagaacaatgtcagcagcggccaggttttcttccagccggtgcagtttagtggtgccagggatgggaacaatccacggcttttgtgctaatagccatgccagtgcgatttgtgcagacgttacccctttctccgcagccagttcacctaacaaggtgaccagtttttcattggcttcaatggcttgtgctgcgaaacgcggtacggtgctgcggtaatcatctttgccgaaagtggttcccggcttaatcgcccctgtcaggaaacctttacctagtgggctgaaggggacaaaaccaattcccagttcctcaagcaacggcagaatttcctgttcaggctcacgccaccacatggaatattcgctttgcagggcggtgacaggttgtaccgcatgtgcacgacgaatggtttgtgctcctgcttcagacaggccgaaatgtttgaccttaccttctgcgatgaggtctttcaccgttcctgcaacatcttcaataggaacatctggatcaacacggtgttgatacagcaggtcaataacatctgttttcagacgacgtaatgatccttcaacggcttcacggatatgttccggacggctgtttaaaatctgctgcttattatcattgccgaaggtaaaaccgaatttagtggcaattaccacgcggtcacgaaacggttttaaggcttcgccgaccacttcttcattcagatacggaccatacacttcggcggtatcgaagaaggtgacgccacgttcaaccgcagcacgaataagttcgatagcctgacgggtatcggtcgccgggccgtagccgtggcttaagcccatgcaaccgagcccaagggcggagacttcgagtccggatttacccagataacgtttttgcattgaatgaatacctcttttatcgcggcttaaacatcaagtttgcggccagtcagccattccaccattgcgggatcgcggtgagagaagaacgcgctggttgcggtatccagggcggtaatttgcagcatatcttcagggctgagttcaaaatcgagaatgttgatgttctcttccatgcgttcttttcgcactgattttgccagtgaaacaatgcctcgttggtagatccagcgcagaacaacctggcccacgctwttgccatacttctcgccwagtgccagtgagaacaggatgctgsaacagaccatttttcccttccgcaaaccggtgcccargcttctgagctgaatgccasgactttgcatccagggcacggcctgtarmtgctgattgaaagggttaacttcaacctggtttaccgccggaacgacgttattaaaagcgataaggtctgccagtcggtcaggatggaagttactgacgccaatagcgccgaattttaccggcctgttgcagctcttccatggcacgccaggctccgtggacatcgccatatggctggtgaatcaagtacaggtcaacgtaatcaagttgcagtcgattcagagagcgttcgaactgggctttggccccttcgtaactggtatcctgcaaccagagtttcgtggtgacaaagagttcgttacgggcgataccgctttgtttcagtgcgttcccgacctggatttcattttgataagaggcggcggtgtcaatcagtcgataaccgctgttaatagcgtcaatgaccgctctttcgcattcggmggcatcggtcatctgaaatacaccaaagcccaacaggggcatttsaataccgttgttcagttttactttttgcatggtgttatccttccgttatcgttcatgagaagcataacgtaaagggaagagctcgattagacggcaggatttgtcaggggttatgaacaaaattcataaatctgtttgagggttgagattagtcgtgcaagttcgatatccccggaatttacagtccgatgaataaaaatgaatgtccataaaaaatatattggtttatcccagcgtatatacttacttcgacgtactcccaatagcagttaattaaaggcgggtcattattattcactctgaataatgaattattcactgcccgcagagtaagaaatataacttaagtatctatttaatgacttgcacaaaaagctaaatttttacccataaataaaaatataatcccgcgcccaaccacctgatgagtggctacagacactggatatattaggtggcggtgtactttcttacataaaggtatttccttttctgtggaaaaggaaaccgggaaatccccggtttttctgacaagcagacgccattatttgtgtctgcctatgttcgttaattcgttcatcaggaaattatctcaatgtcacgttataaaacagacaataaacagccacgatttcgttattcagttctggcccgctgcgtggcgtgggcaaatatctctgttcaggttctttttccactcgcagtcacctttacgccagtaatggcagcacgtgcgcagcatgcggttcagccacggttgagca

SEQ ID NO: 1084 - DNA, 1004 bp, Escherichia coli
atgacaaataaacacccatcattgttttctccttttatgctgacagaaaaaataaagctacgtaatcgtatcgttatggctcctatgacaacctggtcagctaatcctgatggaaccatctctgagcaagaactcgaattttataaacgtcgctcacaaaatgttggtttagtaataacaggatgtacctatgtcacgccaagcggcattgggtttactcatgaatttgccgcgtatgacgaccgtttcattaacagccttgaaaagttagcagctgcagccaaaagtggcggtgctccggctattttgcagattttccacgccggtaataaagccatcccggagcttgtgccaaataacgatgttattagtgccagcgcatcaagcgtaaaatctggtgactttatgaagagagtggtacaaagcagggaaatgactgaaaacgaaattcaggaaaccattagagcattcggagatgtcacaaaaagggcgattaaagcaggttttgatggcgttgaacttcatggtgcgcacggattccttctgcagaatttcttctcccctctatttaaccagcgtaatgaccgatggggaggagatcttgaaggacgtatgcgcttcccgctggccgtattacaggaagtaaaaaatgtagtctatgaatatgcgacaaagccctttgctatcggttacagaatatctcctgaagaatctgtaacaggggggctgcggatagaggatacttataaactccttgatcggctcatttcatccggtatttcgtatatacatacctcgctggtcagtattaacgaaagctaccctgttgagtcccccaatggccccactattgaattgattttaaatcatattgccagacccgtaatcccccccggtaaaatacccacacctctcaggctccaagaaaccaatccctgggcctgccacttgtttccaatcggtaaaaggggctggttgataaaatccccaaatgggttgaactt

SEQ ID NO: 1085 - protein, 334 aa, Escherichia coli
MTNKHPSLFSPFMLTEKIKLRNRIVMAPMTTWSANPDGTISEQELEFYKRRSQNVGLVITGCTYVTPSGIGFTHEFAAYDDRFINSLEKLAAAAKSGGAPAILQIFHAGNKAIPELVPNNDVISASASSVKSGDFMKRVVQSREMTENEIQETIRAFGDVTKRAIKAGFDGVELHGAHGFLLQNFFSPLFNQRNDRWGGDLEGRMRFPLAVLQEVKNVVYEYATKPFAIGYRISPEESVTGGLRIEDTYKLLDRLISSGISYIHTSLVSINESYPVESPNGPTIELILNHIARPVIPPGKIPTPLRLQETNPWACHLFPIGKRGWLIKSPNGLN

SEQ ID NO: 1086 - DNA, 918 bp, Escherichia coli
atgaaaactgtttcgataaaacacacttactgggatatagctgctgatatctatttccctgacgattttaatagtgaaaaaaagtatcctgccattatcagtgcccatccaattggaagctgcaaagaacagacatcgggtagtgtgtatggtgccgccctggcaaaagctggctttatcgtcattgcttttgatgccagttttcagggaagcagcggtggagaaccgcgttatctggaagatccaacaatgcgagtaaaagacttcagcattgtcgttgattaccttaccaccttaccttacgttgatgccgggcgtattggtgtactgggtatttgtggtggaggtggatatgccattaatgccgcaatgacagaacgtcggattaaagccattggtactgtcacgggtgcaaactacgggcgtcttatgcgtgagggatttacagcgtttaatcctatcggagcactcgaagcaatggcgcaacaaagaacagacgaagctaacggcgcaaaacttcgcgtagatgatttgctcccttcttctccggaagcagctcttgaagcgggattaacagaaatagacctttttgaagcaacagaatattatcgttcgccacgaggctgtgcgcctaatggggtaaatcgttcgctattttcacatcagactgttgccgtgggctgggatgcttttcatcttgcagaagtcctgttaactcaaccactaatggttgtagtgggcgatagagtgggcgcttttggtgcctatcgtgacggctgcgaaattattggtcgtgcagcctcaaaacataaagaactggtcgtggttgaaggttattcacattacgacctgtatgataagccagaacctgtgaaacaggcgctcgataaattaattcctttttacaaaacacatttg

SEQ ID NO: 1087 - protein, 306 aa, Escherichia coli
MKTVSIKHTYWDIAADIYFPDDFNSEKKYPAIISAHPIGSCKEQTSGSVYGAALAKAGFIVIAFDASFQGSSGGEPRYLEDPTMRVKDFSIVVDYLTTLPYVDAGRIGVLGICGGGGYAINAAMTERRIKAIGTVTGANYGRLMREGFTAFNPIGALEAMAQQRTDEANGAKLRVDDLLPSSPEAALEAGLTEIDLFEATEYYRSPRGCAPNGVNRSLFSHQTVAVGWDAFHLAEVLLTQPLMVVVGDRVGAFGAYRDGCEIIGRAASKHKELVVVEGYSHYDLYDKPEPVKQALDKLIPFYKTHL

SEQ ID NO: 1088 - DNA, 921 bp, Escherichia coli
atgaaaatagagccttcaattttgccttctcttgcctggtttgcgctgattgttcgtgccggcagtttttccagagcagcctctgaaatgggtattacgcgggccgcattgtcccagaatttaaaatctcttgaggaacgtcttaacaccaagctgatataccgtacgacccgcaatatgtcgcttactgaggaaggacagcatctgtatgaagtgctggtgtcggctttggggcaaattgatgatgcgttgaaagatgtcggtgatacccaacttgaacctacaggactgttgagaataaattcctcccgtgttgcagcaaggatgcttgttgaacctcatattggcgagtttcttactcgttaccccaaaacaaagatagaactcattatggatgacggtttatctaacattattgcggacggctgtgatgtgggcatacgtcttgagcaaggactggatgagcatatgactgccgttcctgtttctccgcttattaaactggttactgtggcatcgccagattatttaaaagaacacggtattcctgaaactcctcaggaattgagtaaccataattgtcttcggttgcggcataaaagtagcggtgcactctcagcatgggagttttcgaatgttgtggggggtaatgaagagttcgaaatagaggtgtcaggtaagtatatttctaatgatgacgaaagcatgatacgaatggcgctgaatggaacgggtatcattcaacatctggattttgcaatcgctgaacatatcaatgcgggcaagttacagccgattcttgaggattgggccgtttcatttcctggattttatatatatgtttcatcacgggtgagaatgccctctaaagttcgtgcttttattgattttatggtggagaaaagagtaaaaatagaaagt

SEQ ID NO: 1089 - protein, 307 aa, Escherichia coli
MKIEPSILPSLAWFALIVRAGSFSRAASEMGITRAALSQNLKSLEERLNTKLIYRTTRNMSLTEEGQHLYEVLVSALGQIDDALKDVGDTQLEPTGLLRINSSRVAARMLVEPHIGEFLTRYPKTKIELIMDDGLSNIIADGCDVGIRLEQGLDEHMTAVPVSPLIKLVTVASPDYLKEHGIPETPQELSNHNCLRLRHKSSGALSAWEFSNVVGGNEEFEIEVSGKYISNDDESMIRMALNGTGIIQHLDFAIAEHINAGKLQPILEDWAVSFPGFYIYVSSRVRMPSKVRAFIDFMVEKRVKIES

SEQ ID NO: 1090 - DNA, 945 bp, Escherichia coli
atgccccccttcatgagtgtctgtgaagaggatgcttctacaaggaaatcgccaatgctcaaagaaaacttcaacgaactgcaaatctttcttgtggtggcaagagagcgaagttttaccaaagcagcgggcaaactcggcgtctctcagtctgcacttagccatgcaatgaaggctctggaggaaaggctcaatatccgcctcctgacacggactacccgcagtgtggctcccacagaagcgggggagagaatcattgcctgccttgaaccgcgtattgacgagcttgaacaggaactggaatcacttattcaattgaacggcatgccctccgggaatattcggttatctgccggggaacatgccgcgcgaagtctggtctggccgaagctaaaaccttttctcagagagtatcccgaaatcaatgtcgaactggtggtggataatggttttgtcgatattgttgaaggccgttttgatgccgggatacgactgggtgaaaatgttgataaagatatggttgcagtcaggattggaccagatatgcggatggctgtggtgggagctccggcgtattttgctgcaaaccctgcgcctgaaacgcctcatgagctacaaaatcatcgctgcatcaacatgcgtttgccaactgccggtgggctttaccactgggagttcgagcgagaagggaaaccgcttcgcgttaaggttgatgggcaactgacgtgtagtccattgccagaaagaattgatgccgcgttatcagggtttgggatcgcttgtgtccctgaagacatggttcaggagtatatagagtcaggcaagcttattcaggtgttacaggagtggtgtccaacttttcctgggtattatctttactaccccagccgcaagcagcatccgccagcttttgcgttgttgatcgatgcgcttcgctacaccgaa

SEQ ID NO: 1091 - protein, 315 aa, Escherichia coli
MPPFMSVCEEDASTRKSPMLKENFNELQIFLVVARERSFTKAAGKLGVSQSALSHAMKALEERLNIRLLTRTTRSVAPTEAGERIIACLEPRIDELEQELESLIQLNGMPSGNIRLSAGEHAARSLVWPKLKPFLREYPEINVELVVDNGFVDIVEGRFDAGIRLGENVDKDMVAVRIGPDMRMAVVGAPAYFAANPAPETPHELQNHRCINMRLPTAGGLYHWEFEREGKPLRVKVDGQLTCSPLPERIDAALSGFGIACVPEDMVQEYIESGKLIQVLQEWCPTFPGYYLYYPSRKQHPPAFALLIDALRYTE

SEQ ID NO: 1092 - DNA, 987 bp, Escherichia coli
atgcaaaaacgttatctgggtaaatccggactcgaagtctccgcccttgggctcggttgcatgggcttaagccacggctacggcccggcgaccgatacccgtcaggctatcgaacttattcgtgctgcggttgaacgtggcgtcaccttcttcgataccgccgaagtgtatggtccgtatctgaatgaagaagtggtcggcgaagccttaaaaccgtttcgtgaccgcgtggtaattgccactaaattcggttttaccttcggcaatgataataagcagcagattttaaacagccgtccggaacatatccgtgaagccgttgaaggatcattacgtcgtctgaaaacagatgttattgacctgctgtatcaacaccgtgttgatccagatgttcctattgaagatgttgcaggaacggtgaaagacctcatcgcagaaggtaaggtcaaacatttcggcctgtctgaagcaggagcacaaaccattcgtcgtgcacatgcggtacaacctgtcaccgccctgcaaagcgaatattccatgtggtggcgtgagcctgaacaggaaattctgccgttgcttgaggaactgggaattggttttgtccccttcagcccactaggtaaaggtttcctgacaggggcgattaagccgggaaccactttcggcaaagatgattaccgcagcaccgtaccgcgtttcgcagcacaagccattgaagccaatgaaaaactggtcaccttgttaggtgaactggctgcggagaaaggggtaacgtctgcacaaatcgcactggcatggctattagcacaaaagccgtggattgttcccatccctggcaccactaaactgcaccggctggaagaaaacctggccgctgctgacattgttctttcgcagaaagatacgcagcagataagcgaggcgctggaaacaattaaaatcgtcggtgaacgttactcgcctgaacatcaggcacgcgtaggccgc

SEQ ID NO: 1093 - protein, 329 aa, Escherichia coli
MQKRYLGKSGLEVSALGLGCMGLSHGYGPATDTRQAIELIRAAVERGVTFFDTAEVYGPYLNEEVVGEALKPFRDRVVIATKFGFTFGNDNKQQILNSRPEHIREAVEGSLRRLKTDVIDLLYQHRVDPDVPIEDVAGTVKDLIAEGKVKHFGLSEAGAQTIRRAHAVQPVTALQSEYSMWWREPEQEILPLLEELGIGFVPFSPLGKGFLTGAIKPGTTFGKDDYRSTVPRFAAQAIEANEKLVTLLGELAAEKGVTSAQIALAWLLAQKPWIVPIPGTTKLHRLEENLAAADIVLSQKDTQQISEALETIKIVGERYSPEHQARVGR

SEQ ID NO: 1094 - DNA, 825 bp, Escherichia coli
atgcaaaaagtaaaactgaacaacggtattatgcccctgttgggctttggtgtatttcagatgaccgatgccgaatgcgaaagagcggtcattgacgctattaacagcggttatcgactgattgacaccgccgcctcttatcaaaatgaaatccaggtcgggaacgcactgaaacaaagcggtatcgcccgtaacgaactctttgtcaccacgaaactctggttgcaggataccagttacgaaggggccaaagcccagttcgaacgctctctgaatcgactgcaacttgattacgttgacctgtacttgattcaccagccatatggcgatgtccacggagcctggcgtgccatggaagagctgcaacaggccggtaaaattcgggctattggcgtcagtaacttccatcctgaccgactggcagaccttatcgcttttaataacgtcgttccggcggtaaaccaggttgaagttaaccctttcaatcagcaggccgtgccggatgcaaagtctggcattcagctcagaagcggcaccggtttgcggaagggaaaaatggtctgtagcatcctgttctcactggcaggcgagaagtatggcagcgtgggccaggttgttctgcgctggatctaccaacgaggcattgtttcactggcaaaatcagtgcgaaaagaacgcatggaagagaacatcaacattctcgattttgaactcagccctgaagatatgctgcaaattaccgccctggataccgcaaccagcgcgttcttctctcaccgcgatcccgcaatggtggaatggctgactggccgcaaacttgatgtt

SEQ ID NO: 1095 - protein, 275 aa, Escherichia coli
MQKVKLNNGIMPLLGFGVFQMTDAECERAVIDAINSGYRLIDTAASYQNEIQVGNALKQSGIARNELFVTTKLWLQDTSYEGAKAQFERSLNRLQLDYVDLYLIHQPYGDVHGAWRAMEELQQAGKIRAIGVSNFHPDRLADLIAFNNVVPAVNQVEVNPFNQQAVPDAKSGIQLRSGTGLRKGKMVCSILFSLAGEKYGSVGQVVLRWIYQRGIVSLAKSVRKERMEENINILDFELSPEDMLQITALDTATSAFFSHRDPAMVEWLTGRKLDV

SEQ ID NO: 1096 - DNA, 11371 bp, Escherichia coli
tacacgccaacaatttgtattacttaaatagaccagtgaaggtacgcatcagaatatccggtgaagtgattaatatttcgttgaatatttctccggatttttgaaacctgctgctgtagaaattctgaacaggaggaattatgcctttagcagccaaacttaccgacaaaggcacccagcacgacggttattacgagaccgtcatcaccgccgggtcatccaccgtttttattgatggctccgcgccgcagggatccgctgacgccgcatgataaaccgaagcatccccctcatccccgaaaatcgccagaggctcgtcaaccgtctttattgacggcctgcccgccgccagaaccggtgatgctattgactgcggcggcgtggttattggtggcggtacggtaaatataggctgatatgtctgagaggtatttatgtccttaaaaggtcttcgctttacgctggaggttgacggccaggagccggacacctttgcagtgtgattcaggttaatccagaaccagtcttatccgtttgtgatgagtgtggatgtcgccagcgattcttttatgcagacggcggagatgctgctggagaagaagcaacgctgacatctggcagggcgtcattccgcagcgttatgtcaccggcgtggtggcggggtttggtatgcaggagaacaacggctggcagatgcgttatcacctggtattgagccgccgttatggcggtgcgggctgcggcggaacttccgtatcttccagcagcaggatatccggacgatatcggccatgctgctgaacgagaacggcgtcacgagtggacgccgctgttttatgaggaccatccggcgcgggagttctgtgtccagtacggggaaagcgacctggcgtttctggcgcggctgtgggcggaggagggattttcttctttgagcggtttgcggcggacagtccggagcagaagctgacgctgtgcgacgatgtggcggggctgtcacaggcgggagagtttccgtttaacccggacgcatcgacaggagcggagacggagtgtgtcagtatgttccgttatgaggcgcatgtccgcccgtcgtcggtgcagagccaggattacacgtttaaggtgccggactggccggggatgtatgagcagcagggtgagagcctgaacggacagcttgaacagtatgaaatatttgattatccgggaaggttcaaggatgagcagcacggcaaggatttcacgctgtaccagatggagagcctgcgcagtgatgcggaaaaggccacagggcagagtaattcgccgaagctgtggccgggaacgcggtttacgctgacggggcatccgcagaagatgctgaaccgtgaatggcaggtggtacagagcattctgtcaggagaccagccgcaggcgcttcatggcagccaggggagaggaaccacgctgggaaatcagttagaggtgataccggcggaccggacctggcgtccacgggtgcagagcaaaccgaaggtggacgggccgcagagtgcgatagtgacggggccagcgggagaggagattttctgcgacgaacatggtcgggtacgggtgaagtttcactgggaccgttatcacgggatgacggaggagagttcgtgctgggtgagggtgtcacaggcgtgggcggggccggggttcggtaacctggcgataccgcgtgtgggtcaggaagtgatagtggacttcctgaacggggacccggaccagccgataatcatggggcggacgtaccatgaggacaaccgttcgccggggagtctgccggggacgaagacgcagatgacgatacggtcgaagacctataaaggaagcgggtttaacgagctgcgctttgaggacgccacggacaaggaagaaatctacctgcacgcccagaaaaatatgcaggtcgtggtgctgaacagcaaggataagcgggtcaactatgaccgggcggtcagcatcgggcatgatgaattcctggtggtggcaaatgaccggaaagtgacggttgaaggtaaacaggaccataaaaccaccaaagaccacgtcagcctgacagagggtaatcagggactggaggtgaaaggcgatctggcacagaaaataagcggcgcgctgggtatcagcgtacagggcgatattgttttacagagcgacagcaaaatcagtctgcgggtgggaggttcatttgtggtgatccattccggcggcgtggatattaagggcgcgaaaatcaatcttaacggcggaggcagtccgggagacgtgatcctgccgatgcgcccggtgatcctgaaagccgcagccgggagtggttcgatgtttgtggcgcattgcccgaaggaggataagtgatggaaacggcacccgtaaagtacgctattgtggatggtgctgtggaggaaggattgctggattttctgaacgaagtgaatcccccacactgctgtctgtatgcagaacccatacagccggatctggtcgcgcgtggccccctatctcgtggaagttgttccggaggttgaagcatggctgagagataaggcgtcgccatggggaatatatctgacttctgagtcatccatgcgtgagctacagcaacacttcagacgttatctgtgggttaggatccccgaacaggagaaacctgttctcatgcgattttatgatccccggaatatatgggtattagcggaagttcttaccccccgccagcttcttttttttatcaaccccgtcagacagctaagtacccgctatggtgaagaatatcgtgaggataatttttcttccgtccgtcccgcagaaactatgaatataagggcagaacggccatcacaactgatgctgagttacagacaatatagccaactggaacgaaaggcacgggataattatcttgatacattatctgtatttatcgaagaaaatgcagaaaaagaagggtgggatgattcatcaaaagctgaatcatcccgaattctggcagaagattatttctctttttgccagtcattaaatatagcagatgatcgttccgtcagaacaatgacgcttatcttactgaaaaaaaacataatcgatctccgatatattccggatgactggtatgaactactcagcaatcagtcatatccgggacatattcgggtacatgaacttgcacaacaggaactgggatttatcccgcaataaaaagacaaacggatagattatatgacatctccatcttcgacagccggaaagccttgtgtggaatgcggcatacctgatccatgtatttttgatgttattagtgattttccagaggccggcgagaaacatttctggtcaaaagaaggaatggcgcgttttaagctactggacgatggttttggatgtgatggtataattaaccattacctaccagtgcgacaacagtgggacacatgaggcatggttagaggaagaatcagaaaacagtcgtaagatactgcaaccttttggaaaacccaataatgttacattatattatgaaggtttcaagggtggaatgaatatcattgatgcgtttcattctccgtgggagtatctgagttcaattaccatgccacatgatgttctttatgaaccagcacattacacagtcagaattgatagctgttacgagcacaactcctatgtcgagattaaggtttatccttcattagaaattcggtttaccacagggcttagttatgagatttcgtcatcacaacagacacgagcggtaaaagatcgacgtgatgaacggagaaaagctcgggaggcgatggaagatacaaaacctaaagataaaaataaactacgaagcggatggacaaatacaaccgctgagtttgagttgtttcacaagacatctcttaccgttgaactgggattaaaagtcgctaatgttgaatatacacacaagtatgtagaggaaataaaaaaactcagacaaataaaacaactggagcagatgagtagaatagatgcgctgattaaaagcattaacaaatactttgcgccagatcctgacaacaaagatggtacgcgtaaatatgcgttattcagtgcaaaaatagaacctgtcacactggggatttcttatgcttatcaatacactgatattaaagatggtccgtgccatttttatggtctatatggtgctccatttttcaaagcatcattccgatttgatatcatctcatttatatgtgcatactgcaaaatggaagatctggtaaaccgatgccgtgaatatctccgcaagcatggaaccagtgttgaatgctatatcgaaatttcaccggaagttaatctcgatcttggggctgtatattctcaaaaagataaagcatgggaatttaacactaaagaaagcaatattaaacttggtttgaaaggtgaggttagtgcaacatttgagacgaatgtttttgtcgtgaaattgaaatctgaggttggtgcttctatagaagcaaaagctgggtttggatttgataaacgagatgatggaatggatcttgttctatttcatgatggagtgacgggcgcgtttaaagttaaggttgacatatctcgcggtgataaagatagaaaagagaatagtgagaaacccgaaaaagaaaatgaacttaagtggcaactatgtaaacctttggaagtagatgactcaccattacggattaatttgtatggtaaggaaaatactgtggaaaaaaaagtaacgccagtgacgcagtggcagataggcactgattattgaacggcgaagaatgaatcaaattaaagataataaggtaattatgaaaataaaaaatttaatatcagtcattttactatcaggaggtattatggggactggattgtactcgagcgataaccatcaaaaaatccgcagcaggtttaatatacaggaatcatattgtgccattaagactaatggtgtccttggattcagcaaccgaaaggatgtattgcgagaaaatggtgattcaaccggaaccaccagttccagcactaatgccatgatgctgatggaaaatggtgaaaatgaaatcagtctggagattggggcgttaaggtggttttctgataaacctgccagtaccgaagaacgagggcatttctcccaaaaagcagggtgcagtctggatttggttcgttttgttaagcaggaagaaaccatactttcttcgataaaggtgaccatcaaccagcagggaatacctgaagcgcagccagacagcatgcatcctgttatccgaaaagagattctggctgagcaggcagaacccggatttattgatccagactattttaatgaaacttatttcccgaaagggatgaaggtgtatcaatttacacaaaaggtctcggtggcggggcttcctgatgggcctggacgcagtacgccctttaccggagcatgacagttacagtaagctaaaagcagcctatatcgaaatggctgcaattattagcagcggggacagggcacgtctgaaagcttctcacaaagaggcactgaaagcctggtcagtcacaaccggtgacagtgaggatgaaatattgctctcgctctatccaaaagaagaaatagaaggcaggaaagccagaatgcagcccatcagatggggcgattacgctatccgggttatgaataatggacgtatggtgcagctatataataaatcgaaaccaacatattctccgctgacttatcgtttcatagatgaagatggtgatgaagttatggggtattacgctccggtattttcgctgattgatggtcagtttatccctgtcacttgattaacctgttgggctacaaatcaggatgtccggtaaggtgattattgctgagttaagcaccttaccatttttttaattttttgtcgctgatattccagacaggaaaacaatatgcctttagctgccagattaaacgacaaaggtacccaggcatgatggctaccggagacagtcatcattgcggcttcatcgacggtatttattgatggattacctgcggcccgcccgccagggagatccgctgacgccgcatgataaaccgaagcatccccctcatccccgaaaaatcgccagaggctcgtcaaccgtctttattgacggcctgcccgccgccagaaccggtgatgctattgactgcggcggcgtggttattggtggcggtacggtaaatataggctgatatgtctgagaggtatttatgtccttaaaaggtcttcgctttacgctggaggttgacggccaggagccggacacctttgcagtggtgaatttcaggttaatccagaaccagtcttatccgtttgtgatgagtgtggatgtcgccagcgattcttttatgcagacggcggagatgctgctggagaagaacgcaacgctgactatctggcagggcgtcattccgcagcgttatgtcaccggcgtggtggcggggtttggtatgcaggagaacaacggctggcagatgcgttatcacctgcgtattgagccgccgttatggcggtgcgggctgcggcggaacttccgtatcttccagcagcaggatatccggacgatatcggccatgctgctgaacgagaacggcgtcacagagtggacgccgctgttttatgaggaccatccggcgcgggagttctgtgtccagtacggggaaagcgacctggcgtttctggcgcggctgtgggcggaggaggggattttcttctttgagcggtttgcggcggacagtccggagcagaagctgacgctgtgcgacgatgtggcggggctgtcacaggcgggggagcttccgtttaacccggacacatcggcaggagcggagacggagtgtgtcagtatgttccgttatgaggcgcatgtccgcccgtcatcggtgcagagccaggattacacgtttaaggtgccggactggccggggatgtatgagcagcagggtgagagcctgaacggacagcttgaacagtatgaaatatttgattatccgggaaggtacaaggatgaacagcacggcaaggatttcacgctgtaccggatggagagcctgcgcagtgatgcggaaaaggccacagggcagagtaattcgccgaagctgtggccgggaacgcggtttacgctgacggggcatccgcagaagatgctgaaccgtgaatggcaggtggtacagagcattctgtcaggagaccagccgcaggcgcttcacggcagccaggggagaggaaccacgctgggcaatcagttagaggtgataccggcggaccggacgtggcgtccacggcagcaaagcaaaccgaaggtggacgggccacagagcgccattgtcaccggtcccgcaggagaggaaatcttctgcgacgaacatggtcgggtacgggtgaagtttcactgggaccgttatcacgggatgacggaggagagttcgtgctgggtgcgtgtgtcgcaggcgtgggcggggccgggatttggtaatctggcgataccgcgggtgggccaggaggtgattgttgattttctgaacggggacccggaccagccgctggtcatgggccggacgtaccatgaggacaaccgttcgccgggggacctgccgggaacgaagacgcagatgacgatacggtcgaagacctataaaggaagcggttttaatgagttgcgctttgaggatgcgacggataaggaacaggtctatatccacgcgcagaagaacatggacacggaggtacttaacgaccggacgacggatgtgaaacatgaccatacggagaccatcgggaacgaccagaagataacggtggtgaaggggcagacggttcaggtcgggaccagaaaagaagggggccacgaccagagtatcacggtggcgaatgaccggcgcataacggtacgcaacgaccagacgctgaaggtgacgaacgaccggacggtgagcgtgagtcatgatgacggcctgtacgtcagaaatgaccgtagggtgacggtgaaagggaagcaggagcataagacgacggggaaccatgtcagcctggtggagggaaagcacagcctggtggtgaagggggacctggcgaggaaggtgagtggcgcgctggggataaaggtggacggggaaatcgtgctggagagcagcagccggataagcctgaaagtgggtggttcgtttgtggtcatccattcagggggcgtggacatcgtcgggccgaaaatcaatctcaatagcggcggtagtccgggaacgccggtgccgacgctgcaaccgacggtgctgaagacaccggggggtgagaagagtggtgatggcagtgactccggagaagaaaatgaagaccctggagggagcggcttggccggaagtggtggtggtgatcgaggtgacgatgaggatgaacctgaaaaatatactctccagttccattttacagacgatgacgggataccgtattcagaaatacgctacattgccttctttgaggacggtgcgcagattcgcggtgaaacggacaaggacgggtatacagaagttttctctagaaccaatgatgcaaatgtagaaattaaactgttaactaatgattattatatatttgaggtgaattgtaatgagcaccagtaataacatgggtagaaccacacaggctcaaccaaagcccggtgtaaatgtctgcatagtaaaaaaagaaataactaataaattcaatgagattattaccaatgctttggctgaacaactagttgttttaaataaaagaaaaaaagacttatatagatgggaggagacagaaaaaaaagaatttcttgatatttttgggagaaatgagattgaggctaataaatggctgctgagaggcgttgaggcaatgatattagtcaatcagagagtgaaaagcaattgttttaaatatcaaggtgatgaatgtatttttgccaaagtgcagggagggattagtagtgagaatcctgttattgtaggccctaaattttttcatgccgcggttaaaggatacgattcccaggtatccactttatgtcatgagttttcacatttaagcgaagttctgtatactgacgatttaagccctccgggtaaaaatgcggaaacaacatctgctgaagaatacagagagcatgcggaaaatcttgtaaaagctaaaagtcgagatgtaatgataaatggatataacattgaacgttacttcgaataagattattcattgcctttatatcacaacctttacgctaatgtttttcagcacaaatttgaaaggtgaaaattatttaatacccaaaaaaaatgcttatggatcgttagtgttcgcagaaaagaagcatgaacatccgggtgtttatgatttatttcaatcaaacaaattcattacaaaagatacgacatactttgatctaactcctgattatgcaatgagtaaaaatgaaaatattatattgcaacaagaaaatcaagttttcttgactctttcagttgaaagtgtcaaaaaaatattatagcgatagttaatgtttataatgctcatgatggctatttgtatatttataaaaagaatataccttataatggtaaggatttatgtgataaacgttttttaattacatcatatgatgtaattctcgattatctgggaggatggtgtaattatggactggatatgtcatcttctgcgtggcttgagataccacctaaaagcaattatacatatcaagttaatttaaatgactactacgtttttttaccaggcaagcatcgctataacgttggtacttttgagcatcttattgtaagaagtaattggttcaggaatgaaaatataaacacggcaatgtttaatattttaaaccaaagtcatcctaagaaaaaaattgatgatttattatataatcttgatctctatggggcaagactaggtgtctttttgagaagcaatgaagtttcgttattaatcgatggggatgaacttgactctctttatagcaagtaagcaaaaatacataatggtaagccatcgattgatacctggcggtagtttaggcgttaattattgggcggataaaggatgtagtttgtcacatgccagagaagttacacggcgaataaacccagcagcagatggcttcgatttagtacgttggccagcatttgagcattcttgatatgtattgaatgatgaaataacccccccacttaattacataaggattgtttaaaacaatggggtttagaaaaacaataatcacttcggtaggtttgatatttatttcattctcttttgtggcaaagtgctctcaactcaaaaatttgaataattactcagtgatgctttgtggaaaagtgtcaaataatatcctggatgatattggtggttataaagaaagaaatatattaatgctgcgagctataaaaaaaatcataataatgacaatcgtaaatattatatttttctattcctttcaatcgactgcggatgaaatggttttaataaaaaaatacgggtttgggcttgagagagatatcaaaggaaggccattaatttatcctatcgaaaattatgatgagtgtaagaaaaaatgcaatcatatgaattatatagcggatgtcaatgctcaattagctatgagtaaaaaaaataacaggatttttgctaacataacctttactaacaatagctctaccacgtatttttttctaaatattatctacctatgaaagtaaaagatggaaaaggagatgaatatgatgcgatatgcaaaaaaccattcagaatcaactctgggaatatcacgttggactacttaggtggttcatgtccttttgaaattaatacgaatcctgaacggtggaatactattaaaccaggtcgtagttttttgttgagtataaccttaaatgatatgtatgcctttataccaggagataattattattttataaaatcatctggctataaatttgttaatgacaagtggtttacactcaaatcaatcaataatatttttctttattttttaaatttaaaaattaattgtgctgatgatttttttgatattaataattttactacatgtaataatttgttattggatgaaaaaaacacttttttattaatcagttatgggcaattgaggatgaaaaaaattctatttacgtcacccctgatgaaatttctataagtatagacggcgataacttaaagttgccatattaggaatatgggaaagaacacggtgcgccgcttttttgcactaaataatttacattttatgttcaataattgatactaacatgttggatattaaaggtgaa

SEQ ID NO: 1097 - DNA, 1950 bp, Escherichia coli
atgtccttaaaaggtcttcgctttacgctggaggttgacggccaggagccggacacctttgcagtgtcattcaggttaatccagaaccagtcttatccgtttgtgatgagtgtggatgtcgccagcgattcttttatgcagacggcggagatgctgctggagaagaagcaacgcgacatctggcagggcgtcattccgcagcgttatgtcaccggcgtggtggcggggtttggtatgcaggagaacaacggctggcagatgcgttatcacctggtattgagccgccgttatggcggtgcgggctgcggcggaacttccgtatcttccagcagcaggatatccggacgatatcggccatgctgcctgaacgagaacggcgtcacggagtggacgccgctgttttatgaggaccatccggcgcgggagttctgtgtccagtacggggaaagcgacctggcgtttctggcgcggctgtgggcggaggaggggattttcttctttgagcggtttgcggcggacagtccggagcagaagctgacgctgtgcgacgatgtggcggggctgtcacaggcgggagagtttccgtttaacccggacgcatcgacaggagcggagacggagtgtgtcagtatgttccgttatgaggcgcatgtccgcccgtcgtcggtgcagagccaggattacacgtttaaggtgccggactggccggggatgtatgagcagcagggtgagagcctgaacggacagcttgaacagtatgaaatatttgattatccgggaaggttcaaggatgagcagcacggcaaggatttcacgctgtaccagatggagagcctgcgcagtgatgcggaaaaggccacagggcagagtaattcgccgaagctgtggccgggaacgcggtttacgctgacggggcatccgcagaagatgctgaaccgtgaatggcaggtggtacagagcattctgtcaggagaccagccgcaggcgcttcatggcagccaggggagaggaaccacgctgggaaatcagttagaggtgataccggcggaccggacctggcgtccacgggtgcagagcaaaccgaaggtggacgggccgcagagtgcgatagtgacggggccagcgggagaggagattttctgcgacgaacatggtcgggtacgggtgaagtttcactgggaccgttatcacgggatgacggaggagagttcgtgctgggtgagggtgtcacaggcgtgggcggggccggggttcggtaacctggcgataccgcgtgtgggtcaggaagtgatagtggacttcctgaacggggacccggaccagccgataatcatggggcggacgtaccatgaggacaaccgttcgccggggagtctgccggggacgaagacgcagatgacgatacggtcgaagacctataaaggaagcgggtttaacgagctgcgctttgaggacgccacggacaaggaagaaatctacctgcacgcccagaaaaatatgcaggtcgtggtgctgaacagcaaggataagcgggtcaactatgaccgggcggtcagcatcgggcatgatgaattcctggtggtggcaaatgaccggaaagtgacggttgaaggtaaacaggaccataaaaccaccaaagaccacgtcagcctgacagagggtaatcagggactggaggtgaaaggcgatctggcacagaaaataagcggcgcgctgggtatcagcgtacagggcgatattgttttacagagcgacagcaaaatcagtctgcgggtgggaggttcatttgtggtgatccattccggcggcgtggatattaagggcgcgaaaatcaatcttaacggcggaggcagtccgggagacgtgatcctgccgatgcgcccggtgatcctgaaagccgcagccgggagtggttcgatgtttgtggcgcattgcccgaaggaggataag

SEQ ID NO: 1098 - protein, 650 aa, Escherichia coli
MSLKGLRFTLEVDGQEPDTFAVSFRLIQNQSYPFVMSVDVASDSFMQTAEMLLEKKQRDIWQGVIPQRYVTGVVAGFGMQENNGWQMRYHLVLSRRYGGAGCGGTSVSSSSRISGRYRPCCLNENGVTEWTPLFYEDHPAREFCVQYGESDLAFLARLWAEEGIFFFERFAADSPEQKLTLCDDVAGLSQAGEFPFNPDASTGAETECVSMFRYEAHVRPSSVQSQDYTFKVPDWPGMYEQQGESLNGQLEQYEIFDYPGRFKDEQHGKDFTLYQMESLRSDAEKATGQSNSPKLWPGTRFTLTGHPQKMLNREWQVVQSILSGDQPQALHGSQGRGTTLGNQLEVIPADRTWRPRVQSKPKVDGPQSAIVTGPAGEEIFCDEHGRVRVKFHWDRYHGMTEESSCWVRVSQAWAGPGFGNLAIPRVGQEVIVDFLNGDPDQPIIMGRTYHEDNRSPGSLPGTKTQMTIRSKTYKGSGFNELRFEDATDKEEIYLHAQKNMQVVVLNSKDKRVNYDRAVSIGHDEFLVVANDRKVTVEGKQDHKTTKDHVSLTEGNQGLEVKGDLAQKISGALGISVQGDIVLQSDSKISLRVGGSFVVIHSGGVDIKGAKINLNGGGSPGDVILPMRPVILKAAAGSGSMFVAHCPKEDK

SEQ ID NO: 1099 - DNA, 738 bp, Escherichia coli
atgcagaacccatacagccggatctggtcgcgcgtggccccctatctcgtggaagttgttccggaggttgaagcatggctgagagataaggcgtcgccatggggaatatatctgacttctgagtcatccatgcgtgagctacagcaacacttcagacgttatctgtgggttaggatccccgaacaggagaaacctgttctcatgcgattttatgatccccggaatatatgggtattagcggaagttcttaccccccgccagcttcttttttttatcaaccccgtcagacagctaagtacccgctatggtgaagaatatcgtgaggataatttttcttccgtccgtcccgcagaaactatgaatataagggcagaacggccatcacaactgatgctgagttacagacaatatagccaactggaacgaaaggcacgggataattatcttgatacattatctgtatttatcgaagaaaatgcagaaaaagaagggtgggatgattcatcaaaagctgaatcatcccgaattctggcagaagattatttctctttttgccagtcattaaatatagcagatgatcgttccgtcagaacaatgacgcttatcttactgaaaaaaaacataatcgatctccgatatattccggatgactggtatgaactactcagcaatcagtcatatccgggacatattcgggtacatgaacttgcacaacaggaactgggatttatcccgcaa

SEQ ID NO: 1100 - protein, 246 aa, Escherichia coli
MQNPYSRIWSRVAPYLVEVVPEVEAWLRDKASPWGIYLTSESSMRELQQHFRRYLWVRIPEQEKPVLMRFYDPRNIWVLAEVLTPRQLLFFINPVRQLSTRYGEEYREDNFSSVRPAETMNIRAERPSQLMLSYRQYSQLERKARDNYLDTLSVFIEENAEKEGWDDSSKAESSRILAEDYFSFCQSLNIADDRSVRTMTLILLKKNIIDLRYIPDDWYELLSNQSYPGHIRVHELAQQELGFIPQ

SEQ ID NO: 1101 - DNA, 1233 bp, Escherichia coli
atgaatatcattgatgcgtttcattctccgtgggagtatctgagttcaattaccatgccacatgatgttctttatgaaccagcacattacacagtcagaattgatagctgttacgagcacaactcctatgtcgagattaaggtttatccttcattagaaattcggtttaccacagggcttagttatgagatttcgtcatcacaacagacacgagcggtaaaagatcgacgtgatgaacggagaaaagctcgggaggcgatggaagatacaaaacctaaagataaaaataaactacgaagcggatggacaaatacaaccgctgagtttgagttgtttcacaagacatctcttaccgttgaactgggattaaaagtcgctaatgttgaatatacacacaagtatgtagaggaaataaaaaaactcagacaaataaaacaactggagcagatgagtagaatagatgcgctgattaaaagcattaacaaatactttgcgccagatcctgacaacaaagatggtacgcgtaaatatgcgttattcagtgcaaaaatagaacctgtcacactggggatttcttatgcttatcaatacactgatattaaagatggtccgtgccatttttatggtctatatggtgctccatttttcaaagcatcattccgatttgatatcatctcatttatatgtgcatactgcaaaatggaagatctggtaaaccgatgccgtgaatatctccgcaagcatggaaccagtgttgaatgctatatcgaaatttcaccggaagttaatctcgatcttggggctgtatattctcaaaaagataaagcatgggaatttaacactaaagaaagcaatattaaacttggtttgaaaggtgaggttagtgcaacatttgagacgaatgtttttgtcgtgaaattgaaatctgaggttggtgcttctatagaagcaaaagctgggtttggatttgataaacgagatgatggaatggatcttgttctatttcatgatggagtgacgggcgcgtttaaagttaaggttgacatatctcgcggtgataaagatagaaaagagaatagtgagaaacccgaaaaagaaaatgaacttaagtggcaactatgtaaacctttggaagtagatgactcaccattacggattaatttgtatggtaaggaaaatactgtggaaaaaaaagtaacgccagtgacgcagtggcagataggcactgattat

SEQ ID NO: 1102 - protein, 411 aa, Escherichia coli
MNIIDAFHSPWEYLSSITMPHDVLYEPAHYTVRIDSCYEHNSYVEIKVYPSLEIRFTTGLSYEISSSQQTRAVKDRRDERRKAREAMEDTKPKDKNKLRSGWTNTTAEFELFHKTSLTVELGLKVANVEYTHKYVEEIKKLRQIKQLEQMSRIDALIKSINKYFAPDPDNKDGTRKYALFSAKIEPVTLGISYAYQYTDIKDGPCHFYGLYGAPFFKASFRFDIISFICAYCKMEDLVNRCREYLRKHGTSVECYIEISPEVNLDLGAVYSQKDKAWEFNTKESNIKLGLKGEVSATFETNVFVVKLKSEVGASIEAKAGFGFDKRDDGMDLVLFHDGVTGAFKVKVDISRGDKDRKENSEKPEKENELKWQLCKPLEVDDSPLRINLYGKENTVEKKVTPVTQWQIGTDY

SEQ ID NO: 1103 - DNA, 654 bp, Escherichia coli
atgaatcaaattaaagataataaggtaattatgaaaataaaaaatttaatatcagtcattttactatcaggaggtattatggggactggattgtactcgagcgataaccatcaaaaaatccgcagcaggtttaatatacaggaatcatattgtgccattaagactaatggtgtccttggattcagcaaccgaaaggatgtattgcgagaaaatggtgattcaaccggaaccaccagttccagcactaatgccatgatgctgatggaaaatggtgaaaatgaaatcagtctggagattggggcgttaaggtggttttctgataaacctgccagtaccgaagaacgagggcatttctcccaaaaagcagggtgcagtctggatttggttcgttttgttaagcaggaagaaaccatactttcttcgataaaggtgaccatcaaccagcagggaatacctgaagcgcagccagacagcatgcatcctgttatccgaaaagagattctggctgagcaggcagaacccggatttattgatccagactattttaatgaaacttatttcccgaaagggatgaaggtgtatcaatttacacaaaaggtctcggtggcggggcttcctgatgggcctggacgcagtacgccctttaccggagca

SEQ ID NO: 1104 - protein, 218 aa, Escherichia coli
MNQIKDNKVIMKIKNLISVILLSGGIMGTGLYSSDNHQKIRSRFNIQESYCAIKTNGVLGFSNRKDVLRENGDSTGTTSSSTNAMMLMENGENEISLEIGALRWFSDKPASTEERGHFSQKAGCSLDLVRFVKQEETILSSIKVTINQQGIPEAQPDSMHPVIRKEILAEQAEPGFIDPDYFNETYFPKGMKVYQFTQKVSVAGLPDGPGRSTPFTGA

SEQ ID NO: 1105 - DNA, 345 bp, Escherichia coli
atggctgcaattattagcagcggggacagggcacgtctgaaagcttctcacaaagaggcactgaaagcctggtcagtcacaaccggtgacagtgaggatgaaatattgctctcgctctatccaaaagaagaaatagaaggcaggaaagccagaatgcagcccatcagatggggcgattacgctatccgggttatgaataatggacgtatggtgcagctatataataaatcgaaaccaacatattctccgctgacttatcgtttcatagatgaagatggtgatgaagttatggggtattacgctccggtattttcgctgattgatggtcagtttatccctgtcact

SEQ ID NO: 1106 - protein, 115 aa, Escherichia coli
MAAIISSGDRARLKASHKEALKAWSVTTGDSEDEILLSLYPKEEIEGRKARMQPIRWGDYAIRVMNNGRMVQLYNKSKPTYSPLTYRFIDEDGDEVMGYYAPVFSLIDGQFIPVT

SEQ ID NO: 1107 - DNA, 2403 bp, Escherichia coli
atgtccttaaaaggtcttcgctttacgctggaggttgacggccaggagccggacacctttgcagtggtgaatttcaggttaatccagaaccagtcttatccgtttgtgatgagtgtggatgtcgccagcgattcttttatgcagacggcggagatgctgctggagaagaacgcaacgctgactatctggcagggcgtcattccgcagcgttatgtcaccggcgtggtggcggggtttggtatgcaggagaacaacggctggcagatgcgttatcacctgcgtattgagccgccgttatggcggtgcgggctgcggcggaacttccgtatcttccagcagcaggatatccggacgatatcggccatgctgctgaacgagaacggcgtcacagagtggacgccgctgttttatgaggaccatccggcgcgggagttctgtgtccagtacggggaaagcgacctggcgtttctggcgcggctgtgggcggaggaggggattttcttctttgagcggtttgcggcggacagtccggagcagaagctgacgctgtgcgacgatgtggcggggctgtcacaggcgggggagcttccgtttaacccggacacatcggcaggagcggagacggagtgtgtcagtatgttccgttatgaggcgcatgtccgcccgtcatcggtgcagagccaggattacacgtttaaggtgccggactggccggggatgtatgagcagcagggtgagagcctgaacggacagcttgaacagtatgaaatatttgattatccgggaaggtacaaggatgaacagcacggcaaggatttcacgctgtaccggatggagagcctgcgcagtgatgcggaaaaggccacagggcagagtaattcgccgaagctgtggccgggaacgcggtttacgctgacggggcatccgcagaagatgctgaaccgtgaatggcaggtggtacagagcattctgtcaggagaccagccgcaggcgcttcacggcagccaggggagaggaaccacgctgggcaatcagttagaggtgataccggcggaccggacgtggcgtccacggcagcaaagcaaaccgaaggtggacgggccacagagcgccattgtcaccggtcccgcaggagaggaaatcttctgcgacgaacatggtcgggtacgggtgaagtttcactgggaccgttatcacgggatgacggaggagagttcgtgctgggtgcgtgtgtcgcaggcgtgggcggggccgggatttggtaatctggcgataccgcgggtgggccaggaggtgattgttgattttctgaacggggacccggaccagccgctggtcatgggccggacgtaccatgaggacaaccgttcgccgggggacctgccgggaacgaagacgcagatgacgatacggtcgaagacctataaaggaagcggttttaatgagttgcgctttgaggatgcgacggataaggaacaggtctatatccacgcgcagaagaacatggacacggaggtacttaacgaccggacgacggatgtgaaacatgaccatacggagaccatcgggaacgaccagaagataacggtggtgaaggggcagacggttcaggtcgggaccagaaaagaagggggccacgaccagagtatcacggtggcgaatgaccggcgcataacggtacgcaacgaccagacgctgaaggtgacgaacgaccggacggtgagcgtgagtcatgatgacggcctgtacgtcagaaatgaccgtagggtgacggtgaaagggaagcaggagcataagacgacggggaaccatgtcagcctggtggagggaaagcacagcctggtggtgaagggggacctggcgaggaaggtgagtggcgcgctggggataaaggtggacggggaaatcgtgctggagagcagcagccggataagcctgaaagtgggtggttcgtttgtggtcatccattcagggggcgtggacatcgtcgggccgaaaatcaatctcaatagcggcggtagtccgggaacgccggtgccgacgctgcaaccgacggtgctgaagacaccggggggtgagaagagtggtgatggcagtgactccggagaagaaaatgaagaccctggagggagcggcttggccggaagtggtggtggtgatcgaggtgacgatgaggatgaacctgaaaaatatactctccagttccattttacagacgatgacgggataccgtattcagaaatacgctacattgccttctttgaggacggtgcgcagattcgcggtgaaacggacaaggacgggtatacagaagttttctctagaaccaatgatgcaaatgtagaaattaaactgttaactaatgattattatatatttgaggtgaattgtaatgagcaccag

SEQ ID NO: 1108 - protein, 801 aa, Escherichia coli
MSLKGLRFTLEVDGQEPDTFAVVNFRLIQNQSYPFVMSVDVASDSFMQTAEMLLEKNATLTIWQGVIPQRYVTGVVAGFGMQENNGWQMRYHLRIEPPLWRCGLRRNFRIFQQQDIRTISAMLLNENGVTEWTPLFYEDHPAREFCVQYGESDLAFLARLWAEEGIFFFERFAADSPEQKLTLCDDVAGLSQAGELPFNPDTSAGAETECVSMFRYEAHVRPSSVQSQDYTFKVPDWPGMYEQQGESLNGQLEQYEIFDYPGRYKDEQHGKDFTLYRMESLRSDAEKATGQSNSPKLWPGTRFTLTGHPQKMLNREWQVVQSILSGDQPQALHGSQGRGTTLGNQLEVIPADRTWRPRQQSKPKVDGPQSAIVTGPAGEEIFCDEHGRVRVKFHWDRYHGMTEESSCWVRVSQAWAGPGFGNLAIPRVGQEVIVDFLNGDPDQPLVMGRTYHEDNRSPGDLPGTKTQMTIRSKTYKGSGFNELRFEDATDKEQVYIHAQKNMDTEVLNDRTTDVKHDHTETIGNDQKITVVKGQTVQVGTRKEGGHDQSITVANDRRITVRNDQTLKVTNDRTVSVSHDDGLYVRNDRRVTVKGKQEHKTTGNHVSLVEGKHSLVVKGDLARKVSGALGIKVDGEIVLESSSRISLKVGGSFVVIHSGGVDIVGPKINLNSGGSPGTPVPTLQPTVLKTPGGEKSGDGSDSGEENEDPGGSGLAGSGGGDRGDDEDEPEKYTLQFHFTDDDGIPYSEIRYIAFFEDGAQIRGETDKDGYTEVFSRTNDANVEIKLLTNDYYIFEVNCNEHQ

SEQ ID NO: 1109 - DNA, 600 bp, Escherichia coli
atgagcaccagtaataacatgggtagaaccacacaggctcaaccaaagcccggtgtaaatgtctgcatagtaaaaaaagaaataactaataaattcaatgagattattaccaatgctttggctgaacaactagttgttttaaataaaagaaaaaaagacttatatagatgggaggagacagaaaaaaaagaatttcttgatatttttgggagaaatgagattgaggctaataaatggctgctgagaggcgttgaggcaatgatattagtcaatcagagagtgaaaagcaattgttttaaatatcaaggtgatgaatgtatttttgccaaagtgcagggagggattagtagtgagaatcctgttattgtaggccctaaattttttcatgccgcggttaaaggatacgattcccaggtatccactttatgtcatgagttttcacatttaagcgaagttctgtatactgacgatttaagccctccgggtaaaaatgcggaaacaacatctgctgaagaatacagagagcatgcggaaaatcttgtaaaagctaaaagtcgagatgtaatgataaatggatataacattgaacgttacttcgaa

SEQ ID NO: 1110 - protein, 200 aa, Escherichia coli
MSTSNNMGRTTQAQPKPGVNVCIVKKEITNKFNEIITNALAEQLVVLNKRKKDLYRWEETEKKEFLDIFGRNEIEANKWLLRGVEAMILVNQRVKSNCFKYQGDECIFAKVQGGISSENPVIVGPKFFHAAVKGYDSQVSTLCHEFSHLSEVLYTDDLSPPGKNAETTSAEEYREHAENLVKAKSRDVMINGYNIERYFE

SEQ ID NO: 1111 - DNA, 261 bp, Escherichia coli
atgtttttcagcacaaatttgaaaggtgaaaattatttaatacccaaaaaaaatgcttatggatcgttagtgttcgcagaaaagaagcatgaacatccgggtgtttatgatttatttcaatcaaacaaattcattacaaaagatacgacatactttgatctaactcctgattatgcaatgagtaaaaatgaaaatattatattgcaacaagaaaatcaagttttcttgactctttcagttgaaagtgtcaaaaaaatatta

SEQ ID NO: 1112 - protein, 87 aa, Escherichia coli
MFFSTNLKGENYLIPKKNAYGSLVFAEKKHEHPGVYDLFQSNKFITKDTTYFDLTPDYAMSKNENIILQQENQVFLTLSVESVKKIL

SEQ ID NO: 1113 - DNA, 492 bp, Escherichia coli
atggggtttagaaaaacaataatcacttcggtaggtttgatatttatttcattctcttttgtggcaaagtgctctcaactcaaaaatttgaataattactcagtgatgctttgtggaaaagtgtcaaataatatcctggatgatattggtggttataaagaaagaaatatattaatgctgcgagctataaaaaaaatcataataatgacaatcgtaaatattatatttttctattcctttcaatcgactgcggatgaaatggttttaataaaaaaatacgggtttgggcttgagagagatatcaaaggaaggccattaatttatcctatcgaaaattatgatgagtgtaagaaaaaatgcaatcatatgaattatatagcggatgtcaatgctcaattagctatgagtaaaaaaaataacaggatttttgctaacataacctttactaacaatagctctaccacgtatttttttctaaatattatctaccta

SEQ ID NO: 1114 - protein, 164 aa, Escherichia coli
MGFRKTIITSVGLIFISFSFVAKCSQLKNLNNYSVMLCGKVSNNILDDIGGYKERNILMLRAIKKIIIMTIVNIIFFYSFQSTADEMVLIKKYGFGLERDIKGRPLIYPIENYDECKKKCNHMNYIADVNAQLAMSKKNNRIFANITFTNNSSTTYFFLNIIYL

SEQ ID NO: 1115 - DNA, 465 bp, Escherichia coli
atgaaagtaaaagatggaaaaggagatgaatatgatgcgatatgcaaaaaaccattcagaatcaactctgggaatatcacgttggactacttaggtggttcatgtccttttgaaattaatacgaatcctgaacggtggaatactattaaaccaggtcgtagttttttgttgagtataaccttaaatgatatgtatgcctttataccaggagataattattattttataaaatcatctggctataaatttgttaatgacaagtggtttacactcaaatcaatcaataatatttttctttattttttaaatttaaaaattaattgtgctgatgatttttttgatattaataattttactacatgtaataatttgttattggatgaaaaaaacacttttttattaatcagttatgggcaattgaggatgaaaaaaattctatttacgtcacccctgatgaaatttcta

SEQ ID NO: 1116 - protein, 155 aa, Escherichia coli
MKVKDGKGDEYDAICKKPFRINSGNITLDYLGGSCPFEINTNPERWNTIKPGRSFLLSITLNDMYAFIPGDNYYFIKSSGYKFVNDKWFTLKSINNIFLYFLNLKINCADDFFDINNFTTCNNLLLDEKNTFLLISYGQLRMKKILFTSPLMKFL

SEQ ID NO: 1117 - DNA, 41828 bp, Escherichia coli
  misc_feature (12048)..(12048): unknown
  misc_feature (17019)..(17020): unknown
  misc_feature (17023)..(17026): unknown
  misc_feature (17030)..(17030): unknown
  misc_feature (21033)..(21033): unknown
  misc_feature (29608)..(29611): unknown
  misc_feature (32059)..(32059): unknown
  misc_feature (32185)..(32185): unknown
  misc_feature (35059)..(35059): unknown
  misc_feature (35140)..(35140): unknown
  misc_feature (35144)..(35144): unknown
  misc_feature (37006)..(37006): unknown
  misc_feature (37055)..(37055): unknown
  misc_feature (37058)..(37058): unknown
  misc_feature (37086)..(37086): unknown
  misc_feature (37391)..(37391): unknown
  misc_feature (40996)..(40996): unknown
  misc_feature (41366)..(41367): unknown
  misc_feature (41375)..(41375): unknown
  misc_feature (41380)..(41380): unknown
  misc_feature (41382)..(41382): unknown
  misc_feature (41384)..(41384): unknown
  misc_feature (41390)..(41391): unknown
  misc_feature (41723)..(41723): unknown
  misc_feature (41771)..(41771): unknown
ctgtaatgcaacatatagaccgccttaatgtcattaaagcacttgtgcttctagaagatgagcagattgttcgttttaacatcgctgcgaacgataacgcctcgcagatccacatgctcgttgacggtctgggcgtcgggctgacacatgagcctgtcgctgccggaatgatttcgcaccggacagcttgtcaccgttctaggcaacatgacagacctgcgcattcctatttctattatctatccgcctaccaagttgcttaatgtcaggctaaggccctttaatgactggatttcagaccgattttctggacaaccgagcgggtaaatcgcagtacactgacagctagacaataaagctccggttcatgtttgaaccatgtgtagtgaatgtccgctgttcgctcacaacggaccttcagctcagccgttccggccgcttcatgccatgaatgtacgcagccagtcagaatattaaggtgcggatttcagttcacttgccagcccagtgatacaggacagtaatgaccaacaatttggtattgatacaacaagctgcggccccggttcgtgggggagatgaaacgaaggtagctgaagttactgaaatgaagaattcagagagactgaatgatatgcctcacctttagtgaatagtgtaaaacgggagactctcacccgggattatccactcatgctcaatgtataattttcgtgcccctcacaggtaagagccggatacattcgttgtgtatgctgcagaattggtaaccggggccctgcagtctttaactccgagtcttgtgctgctcatttgccacaaaatcctggtacgccagctcaatcatttcattcaacagtttttttggggggcaccacgacttcgggcaatactttcaggctgtttgtggatttttccggacagtttcagcggaacggaaccatcagcacgttcatcacgccttttttgttgctcccgggcacttttcagttcatccacaatatagctgctcttctcgcatttttgccgattttaaaaatgcgaacaaaacatccgtacatgatgtacagattaaactgccagggactggtgtcagaaagcctccggttagcctgctctttccggaatgtgccggttatgaaaaaccggaaattcagtctctgttgtaagatgtaccctctgatactacgttttcgttttctctgtgtatttaactcactgtatttattgtctttttaagcctgactgatattctccggtcatagtgtgctggatagacatcccgtaaccttctcatttttatataaaaatacctgcactgtcttcagcgcatctgtctcctttaagtaaaaaatgttttcacgtattgctgtaaattcattttaaatcagtatgttatcctgatattgctgtctcctggtttgatgcgtaatcgttctgcctttctggatgattctggtgcttccgggtgcattctcctctgcacatgcaacagttcgtcatcgccacgtgcccaaaaagcatataaaaacgaatcgaatctgatcgttttttcaatcgtttttcacaggaatttcgtagggtgttctccgctatagcctccatatttgctgtctttttcttcataaatcgtatgcaatataaccagtctgtcaagacatcttccctgctgttgaggtgacgatctcatttctggtcttttccgggagagagacggtcagatgagcgagccggatttactgccagaggtactccccgcggcagaaaatagtgctcctgtttccgcaatccgggatcggcaacgtcccatggttaatgccacttgcagcgtcaggcactgcaggtttacgtcgtgatctgatttcttctgcacttatcccgatcacggaagttccccctgcgcagacatcggttcctgccgacatttcacaataccgccaggctgtcatgcagtaacacccgcaatgcggtctgcggttttaagcgcactctcctgttttcagtgcaccgataagcgttatagaaagtctggggtgagttactgaatgtctgttaagtggtgccgtgggtggagactgcttacttttccacagcaactgcagtcattcaggatgctcaggagagaatatgtcaacgccacgagccgggccattttcatgccagccagtatattttctacactgatgcagtctgattttcaccattccatcctcactgattgtcgtgttgttttgggtcatcaccacagctttccgtttctcttttaatcggtaacgctctcctttgatattcagcgtggttgagtgatgcagcagtcaatccaggagcgctgttgtccggcaaccaccatatcaacttcttcccggcgtgccggcgctggtatccaggccgggtttcgaagcgaagcgttcctgacggactcattgacatccgggccggatgtagtcatgcagcatggaacgtccgcccgtatacactgacggcgtccggccgtgtacagagatcggtaaaattcgttactacaactgttcctgaatatctgacgaagaaacattcagccataacatccggccgtgtacatctcttttgcggtgcagggagtgctgtcgccatgtacttattgtcaccagggtgaggcatgtaccgcagcatgccagctcagcaatgacaggatgcccttaagacatccgtcatggctcagtatgatgacgacgaacacgctctgcaggtgagcatgcagggccgggggtatcatcatttccgtattttgccgcaccttccggaaacaaccggcatcagttacggttaccgtcaaccgttgtgcggtatgccaggagcacgtactgatccatcagatccgtcagtgctgcgttctgcttctgacggtcgatgatccattcccccagctctttttctgatttccgtttcaggttctccgtccagtcgtcaaggctgtttccggtcattaaatcaagccagcaaagccagaccagtttgaggcgcaactccgtgccaccaaactgacggaagaggctgatcagtttatttgccagagaacgctgcctcagacgttcacattcagacagcagaatcccttccagcatcggatgatgaaccagcagatgttcgctggtgcataagttcaccaccagatcatcatccaggggcggcgtggcccgtttgtcagagccataaatcagccggtgcagactccggggtacgatggcaatcttcggtttttcaccattgaatgacacccacccgggcgtcagattctggaagtagtggatattcggatgacacacggccccaggatacggcgtgccgggtgaagccggtcagccatttctggtagctttcgtggagcagctcgtaacgggtctgatactgtggtttcattttcatattcctcacgggggataacaggcagcagagtgccgccggcaggccggagattgcgtctgctgtgggcgaagggccagtggttaaaaattacggacgggactgtgcaatacgcgcctgcagccaggcttccacttcacttttcagccagcgggagctgcggccgagtttgatgggtgccggaaaggccccatccttgatgagcttgtaaaaccacttatcggtcaggccggtcagctgagtgataaacgtcatatcgaccatctggtcatccatcagcgaaactggggtggtcataaaaatctcctccggatgttgttaatctcagccggcgttgatgatgaaaacaacgcaccaccttcaccggcataacaaccggggagaaacgtaaaaaatcagtaggggaatattcctgccaggagagaaactgttgtgtacaggcaatacaggttgtctgttttgtcagtgaagccggtataaacggaagatgattttgtgttgccggaatatgggatggcgttttgccgtgacgggatcagtattttcagtgatgattattactgtgcaggggagtaccggagataaaccacgccctgtacctgccagagcggaggtttgtatttactgaacggaagataaagcgaggtaaacactgttgcggtgagcggagaagactgagattattctctgtaattacaaacaacagtgatctgatccggtttttttaccgttacgggtttccggggatcaattttatagaccggggtaatgaccacgccggaatttatggagaaaagcgggatccagcaataaacgtccggatatttctgtgtctccggaataccttttgcgccagaggccatcagatctttaacgctcacgaaaaatgactgccgcagatcaaaaaagtactcgtcatatatcacgtcttttgccagcaggatgactgcattaccaacagccgcttttacaggtgtcccaccggatggattatcgtgattgtatattgttctttcaatataaataaaacaggcatattttgccttctccccggacagttgcatctggtattcgcaaatgtctttgatacgccggctttcaacccgtccaatcatcttatcccggcgatagtgtcttttatgtttcagcgcgtacagaacaccatttgaactgtcaaactccaggattcttttggtgaaaagtttgttttcccagatctccagacaatacttctctgcactgacgacattgcgtttgtgaggaagatcccgttgatacactccatttaataagcgtgactgcagtttgcctgcaagttgataataacagttaatatcgttaaggacaggtgctgtggcgctgagtaatgcgtcgattaccttagagcgcgaaagtttgtgggtatgacagtactcatccacaattcgcagcgtctcatcactggtcatattgaaagttatacgtgttgtcatgatgaaattttctgttaatcatactggttgatatgcataacatttcataaaaaatacttttaattcatataattgattttttgactggttttatcctcgtgtggtggaaagtagtgttactgccactgtagtcagcataactctatcacacagaaccaccgaaaatgaagcattgctcaggggggaagctgccactcgtacgagttttctgagcaatgataaccagtatttttcgttttgggcgatttgtttatcgttacagctaaaaacagttcatgtaccattaaaaaataataaaggttaattagtattatttatagaagtatgtttatgtaattctaccgtgtaaatgaactctgtcattgtaccttgtaattctatcctgtaattctacctcgkaaatacaccttgtaaccaagtcctgcagaagtctgtctcatcgaacaatattcctgtgcagcgatattctctgtagtagtacttgtaactctgcccttaactctctcttcagtratgtagtcccgccacacctgaatatawatctgtaatgttcacacactgactgtaacgtgctttgttaagtaatgtctgctatttttgtctgttatttttcctgttgttttctgtattttgytgyatggtgtaataactattctgaacccgtcatcacctttatagctaagagtatgacttckgccagtgttgatactgtggataacggtgattaaggaattactgttaatgatctgttcctgcagctcacctgatgagttttggtagtaatacgtaaaagagtatgcctcatgtcattaaaaagtcttccggagtgttgtttaaccctgtacctctattactcatgtagtacgttgcggaaagctaccgttaattgtaatatctggttatggcgttatgccttcagtattaaaaacatcttttaccggagaaacagggaagtggaaaggctttcgggataacgtcaggccattatgacgatattacgttaatcacagtacaagataacgagagggtaatggaattttaaaccagagtagttccactgttgttcactggaaaaagtgatttcccacgcgcgttataagcttactccagaggagatggaagccttcaactctgcggtcgatcaccggctggcagaactgaccatgaacaaactttacgatcgtgttcccgcttcagtctggaaatatgttacctgataaatgtttctgatgaagtacagtcgtcacaatgacatcacttcagatattatctgcgctgtgattgactgtcacgtatgccgttctctgtatggttctgatacccgggtgtggtcccactttctctgtggcgcccggggagttgtgaacctgcacgtcttcgtgtgataacgttttcttcaaaaattacgccagcgcttcttcctgtgttacagaacacgaggaagaaacatgaagacttacaacaccaatcccggttacgaaatggatccccagctcctgacacactttaaccagcatctggattcattattcggggtatattcgaaactgttaccgttcagaatggattttgcttaccgaaaaaacaccctcagctacaggtgtgcctgcaggtacgccatgtgtgcggagatactgcgactgattaacgaagtgggagagaaactggtcgggtatgcctgggtaatggaatatacggaacgtaaagggcttcacattcattttgtgggctatctgaacggtcagagccacaggagttcgtatctggtatccagattgatgggagatatctggaggcgggttaccgggggggatggttactaccactggtgccggtttaataaaaattatccggtaaacattaaccacgtcattcactattcagatcacaaagcggtgaatgccttacgctatgccctcagctacctggccaaacgagaacagaaagaatgtggcatcatcctgaaatgcagcgggcttcctgaaaaaagtaaccggggtcgaccgcgactgggcagcaccctgccggagacttattctctggtgtaagaccctgaacgacaactacgggctggcgctaattgttacggtcggttccggaggccacttcagggactctgcgcattttttacgacatggctattccgtatgaaccatacggagatttaaccatggcacattctttaccattccttccggcaaccgatacagcgcatcccccgatgtccatccctgcctactgacagttttttacgccggtgggccattgtgtgacaaccacagtgctgtaacagcaaccagcctgctttacccaaactccagtccagattttaactgaaccgccattcaccccctgaccacactgcccgtaccgggacagctgttgcctgcgtgtcgtctggcggctgaggaatatgacgatgtacgcaaaatcctttattgcatttgatggcaatgggcgtctgacgggtgcccgtaccgcacagactgcaccttacgatcgctacacttgccacctttgcggcagtgcgctcagataccacccgcaatacgacactgagcgtccctggtttgaacacactgacgacgggctgacggagcacggtcagcagtgcccttatgtcagaccggaacgcagggagatacaactgattaagcgtctgcagcaattcgtaccggatgccttacccgtggtgcgtaaagccagccggcactgcagacaatgtcatcacgattattatggggagcggtactgcacgcactgccataccgggcacttcagtgaggagggggtggcagaatgaacggtataaaaacggggctggggatcacgccgggtgaacacataatcagtgctgattctgcactcagcagaaatatccggcagtgtttctgcctttcctgtcatggccggttgattttgcagacagatgctcagggggcatggtttgagcatgatttatatgccctgagcgagcaacagaaggcagcctgcgtggtgctgaatccggaaaagtcccacccttacattgaggatatggagatgttttatcgccattaccggtcgtgctggagtggcattgtatgatgtgtgagcagttttttcatgggaagaaattctgtgaggcctgtggtacggggatttattgcagagcggtatgtacgaagtctgtttacagctaccagccagacttgtttcaggactgcggaggtgcgagtacttaatccgaaatgcccgacctgctcagggcgttcagaggtatcggaacctgcattttatctggtgtttcgcacccaccccgttcgtgacacaaaggcgcgacaccggatatccgcagtcctgcttacctgaataaaacccggggtattgattgtgtactgtggtgcgaaatcgcaccgtgatcgcggattcgccgaatccgcactgtggtgtcaaccaaccatacgcgagagtcctctccgtatttatcagtgcctcaggacgatttctgcatagttaatccagggggctgcattgtttatttccctgctaatggacgtgacatccaggatattcatgatcctgatttccctgagcagtatcagcgcttattggagcgtctggattatcagacgatgcccggtactaaagcatcaggccagcgtaactctggctacagcggtttttgacctgttgtaactgtaaggtgatttattatgtatacagaatcaaatgttaagctttcctgtaacgccctctggcaaaagtgtgtccttgcaactctgtatcgggctgcagccacacatcctgaaattaaattattacaatttaaattaataccagggcagggtattaataaggccattccctctctgatggctgattttactggtgaactgcatagactcatttctgaatatttgcagtgtaagcgacgtaaagatcaatctgttgagcccacccctttatattatctctggagtagggaagctgtggctaacgataccactccttatcttatggtgctgctacttaataacgatgtctggtgtaagagtcgtgaggtggtggttctcagaaatctgattgagcaggcgtggggaaaagtattgggtgaagataactccattacacatctggttgtgtatcctgaagtgctgtcgttggtatttgatgcagctaacacatacaacgctgagcctggtgtactggaacagacggcccgggcttacattgaatcacatgctaccattgaacgtcatcttgggtgtagtgacttttaacgtcaggtgacgcattgtcacttctgacctgctacctgtacgccggaatataatggtcagagaggcatatttcgacgcccctaatctggggcgtttgattcaggatgtctggaataatccgggctttgtgtcaccgggcgcatcaaagcagtaccacccgggatgtggcgctggatcgtcatttaccggactgcgaagacatacttaaagaggtgatatgggcgttcagtgattttgtccgcgatcatcgaggtgtgtatgatccggaagcccgttacctcgccggtaatccctggtatcccgtaacaggccagttctgaaagcacagctcagcagattccccgcattcgcacaatcttcataaatctcacaggggacattctgaccgtgttgactacaacaagccacgacagcgtatttctgcgtgccgataattccctgatcgacatgaactatatcaccagtttcaccggtatgactgacaaatggttttacaagttgatcagtgaaggccatttccctaaacccatcaaactggggcgcagcagccgctggtacaaaagagaagtggagcagtggaagtgaagtagagcagtggatgtagcaacgaatcgagtgatcaagggggggggctgcagtattgttcaggattagtattatcagttgacgctatagaaataatagaaaaataaaataacttgagtgaatttaatgaagtcgtagaggttctaattagtatacctctggtaaaactatattgtttggtaaaagaaaggtctgctgaaacgtttaatttccattacaacagtaaacttatactcagattatgtaatatcgacatttgagataaattgtgaagataaaagagaagccatatttattatatatggcttctcataataactcatctatctaataaatttttaacgtaattaaccaattctttatctttactattattaaagaagcatttctggaatttttcgccaccaagagcttgtttaagtaactccggatcgatggcctggagagcatccatgagtggcttactaactgcttctttcatattactcagtataatggcattcgcattttgtgattcacgacgttctgccggatagcctaatcccttttcgccatcaaatgctttttcaaaaatatagcgcatgtttaattctgccccccagccaaaaccctttgcaaatggcaaggacagtgcattcccattatttacctgtgcaaacaggtaggcatctgttggttcgatgcaataaccacaagtaactcccgggaatgtgttcagtgccatcaatgccccctgtcctgtaccacagccagtaataacgaaatcaacagatctgctgtttaacaagatagccgaaataatgccgagatgaacgtaagtcagacgatgatcattgtcatcacacattcctacattgaaaatagtatggccttgatgtgcgcttgctgcaactaactcattaaaaattattgcgtttttagatgcctggctaaattcattcatcaatgcgattttcatacgaattcctcatttaaaatcatactgttaaacttcatagcataacaacatgaacgatatgataatacattacaaacattacttgcaacattgtatttgaaaattcaaaacatcatttcatttttattgttgtgtgctctcgatcacggtttgctgcacttttgaacgctatattggatgctaacgaaacgatagaaacgatatgatgaagtattgtcattcttataaaggataagattatatggctaagggtgatattaaaaagttgaagtttgaatctttctacgatagtgaatcgaataacgaagttattcgattaacgccaacagatattctttgccatcgcaattatttttatcaaaaatgttttacaaatgatggtaaaaaattgattttcgctgctgagtttgattgtaaccggaattattatcttatggatttggtaactcagacagcgaaacaactcactgaaggagctggagataacacctttggtggcttcctgtcccctgatgataattatcttttttatgtgaagaatgaaaaacatttgcagcgtgttgatttgaccacattagaagaagttaccatatacacagtaccggataattgggtggggtacggaacatgggttgctaatactgattgtacggaaatcgtcggaatcgaaatcagtaaaactgactggaccccgcttagcgactggaaaatatttctggaattttatcataagaatccacgatgccgtttaattacgattgatctggaaaccggaaacgctgaagtgatattggatcgtaatacttggttagggcatccaatttttcgtccgaataataacgatactatcgccttttgccacgaagggccccatgacctggtggatgcaagaatgtggatgattaaccgtgatgggacaaatgagcgtaaagtgcatgagcaccaacttggtgaaagttgtacacacgagttctggatccctgatggatctgcactggcttatgtttcctatatgaaaggacagcaacagcgttatattcgcaaatataatcctgatactgatgaagattcattagtgatggaaatgccggcatgttcccatttaatgagtaaccataatggtattctctatgttggtgatggttcaggtagtccggttgatgttaaagatacctgcagttataaaattgaaaatgatccctggatttacattcttagcagtaaaaataaaaaaatacataaattggtgaaacataatagttcctggagggtacagaaaggagaccggcaggtaacgcacccgcatccatcattttctccagataataagtacgttttatattcttgcgatgccgaaggtgaaccagcnctatatatggctaaaattcctgaggaaatcttaacccagcaataactgacaaatttttcactattggagtttttatggatttcatcaatatgttctctcttaaaggtaaaaatgctttagtcactggagcatcatatggtattggttttgagatcgctaaagcactaagtaacgctggtgcaacgatcatttttaatgatgtaatagaagaaaacattaaaaaaggcctggcagcatataaagagaacaacatcaacgcacatggttatttatttgatattacagatgaacagtctgtgaaggaaaatatcaaaaaaatagagagtgacgtaggcattattgatattctggtaaataatgcagggattattcagcgtaaacctatgctagaaactacagcagctgattatcgcaaaataatagatattgatctgacaggtcagtttattatggctaaggcggtattgccttcaatgattaaaaaaggacatggcaagatcattaatatctgttccatgatgagcgaattgggtcgcgaaaccgttgtaggctacgcttcggcaaaaggcggcttaaaaatgctgactaaaaatatctgttctgagtttggtgaaaaaaatattcagtgtaatggtattggtccaggctacattgctacacctcaaacagcaccgttacgtgaaattcaaccagatggcagccgccatccatttgatcagtttattatatcaaaaacgccagctggacgctggggtaaaccagatgatcttgctggtgcagctatatttttagcatcggatgcttcaaactttatcaatggtcatattttatatgtcgatggtggcattctggcctacattggcaaacagccttagttatattcagtcataactgtatgtactactttaaatattttcagagaggtggtgatgtttgtatttaatgaagatacagcaatagaagatttaggcaacggggtcaaaagaaaagttttggctcatggtggcaatatgatggcagtagaggtccatttctctaagggggctatcggctctttacatcaccaccaacatgaacagttgacgtatgtcttatcaggtatttttgaatttaccatcggcgatgaagtgcgtacagtaaaaactggtgatactttatataagcagcccaacattgtgcacgggtgcaaatgtctagaaaaaggagttttgcttgatatatttacacctcaacgtcaggattttttaaagtaaatacccagtattaatatgaactaaaatggtagcgcataaaatgcgctacatattgatatagttaactaattatctattgtttttctttctgccatagacagctttaatctgaaaaatattatcttttaaatggaaattttagaaataatagaatctgattatccggatatttagttgaattctataaagtcgagtgaacatattgttgtatcaatatagttaatttaaataattcaggaaaaacacatatacagtgagactctataaatttactttataaataacagtgtaatgttacttcaataatatactccatcttttccaggagatggaaatggacttttgttgtggaagaggtatcataaatgactgaagaaaacagaagaataaaagccataactcgtttttcatatggtagtggaaatcttatcggcagtggagctctggctattagtggagcatggttactttatttctacactacattttgtggattgacagtttttcaggccactgtaatattttccattgctacttatctggatgtcatcctgaatccactaatggggtttattacggataatttttatcagacaaaactcggtcgtcgctttggtcgtcgtcgcttcttcatattaattgccattccatgtatgattatctatccattgctttgggtaaatggtatgagtttttggtattatctttctacttatatcatttttgaagtggtatatactatgattatgataccgtataataccttacctgttgaaatgacaaaggatttcaatcaaaggacctatttgacaggttctaaagctatgtttggtaaagtagctaatttcttagcagccgctattcctggtatctatttttacttcttcaataaagattcagccaccccatttttcctgaccggtttaacttatgctattattatgatcacttcattaataatgctctatttcaacagttgggaacgtccaactgatgatgtagttgatgaatcaacgcatggttttatggagggctttaataaactttttaccgatcttttctcaacctttaagctaaaaaccttcagaacccatcttggtatgtatctatttggtttcggcgctgaatggctatttacagcgacatttacctatttcattgttttcaaccttgaacaaccgagaacatttgtttctgagatgaactcattaagcagtatttgtcagttcttctctacagcattctttatgatgtggtgtgccaaacgaggatttaaacgcccatttatcattgctatcttaattgttgtatcttcagtgattggttatgttggtgtgtactatcttaatattccccatctgacctggctcattattggcatcactatctggtttggtctggggacggggggggtatattacattccgtggagtgtatatgtattccttgccgatgttgatgaggtcttaactggtcgtcgtcgtgaaggtctttatgctggtgcaatggttatggccggtaagttaatgagagccactgtagtattttgtctgggggttgtcctcagtctgtttggttttgagtcaggcattcatcatcaatcagccagtgcagtaaatgcaattaatggcgtcatgatatttggtgtggctggtatggcgttaataggtatctatttctctgtaaaaatgaaattagataaagcatctcacgccgaaataactaaagaattagagcgtctgaaaaaaggtggcagaaaagaagatgctacaccggaaattcgtaagcttgttaagcaactgactggttatgaatatgaccagtgcttcggtaataacaatgttggctttaaatttgaaaacaaagcaggggcattctagaatgaataagcacacactattactgactgttctttttctgaatttgatttgtactcccgtttttgctcaaaactggcaggtggcgacgtttggtcagtctacggatctcaacttttcatcgctgatagattcggccaagatcggacggaataatgcctggcttgcaggaaacaataattttcttgaagctggaaaattttacactttaccaacagatttttttattgaaagccgtgggggaaaaattgctaactcccatgacggtatgaccgtcttttatactattgttccggttactcagacattccgactggaggctgatttgacattagaacagattggtccggaggtgaatggaaaatcaccagcgggacaggagggagctggattgtttgtcagagatattatcggtcctcagcgacaggaacctcagtcagctggaacagaagaatatccccaggcctctaatatattgatgaatgcctttattacacagaataaaaagaatgataacttagtacagattacttcaattgttcgtgaaggagtaataaaaacatggggtaatgaaggtattacaattaagaaacagccgatcattgagaatataaactttacgcaaaaaagaaatattcatatgacgatcgagcgactaccagagaagttcatcctgaccgcttttgataccgatcgtaaagaaaatcagtcatggcaattttctgattactcaggctttatgaatcaactggataataatagtttagctattggtttttttgccgcacgaaatgcgaaactaagggtgaaaaatgcatcatttaaaccgggcaagccactggttgattacaaacaattaacttcacgtcaattcagtcgtgtccggcataaagcccctgaactttttcttgcttcacctcaatccgttgtaagaaactcaacaactcttcaatttttggccaatcaggctggaatagtcagtattgataatgataagcagactaagcaggtgcaggcgggtgaactggtacagtttccagttactttgcaaaaaaaacataatgacttcaccgtcaactttaacgttgatgggaatatatcaaaaaaagctatacgcatagagcaggttaaatcaaacctgactgatccttatgagatttacgtatgtagtgattgtcgacagggggccagaggcagcaaaaatgaccctgtagatttacagacagccgtaaaatttgtcgcacccggcggtaatatataccttaacgatggtcaatatcatggaattaccttagatcgggaattaagtggaatacctggcaagtataaaacaatttctgccattaatccacataaagccatttttataaacaagacattcaatctggatgcaagttactggcatctaaaatccgtggtctttgacggcaatgtggataatggaaataataaaccagcatatttgcgtatagctggtagctataatattattgagcatgtgatagccagaaataatgatgatacgggaatttctatttcagcgaaagataaaaaccgttttttctggccagctcataacttagttttaaactcagattcatataataatcttgatttatccgggattaatgccgatggttttgctgcaaaattaggtgtcggaccgggaaacatttttcgaggatgcattgcacataataatgcagatgatggttgggacctatttaacaaaattgaagatggtccaaatgcatctgttactattgagaattctgtagcctatgaaaatggcctgccatacaataaagcggatatcctaaaagggagtattggcaatggcnntannnnaggnggtgaaggtcaacccagtaaatcacaaagttattaattccattgctattaataataatatggatggattcactgataattttaatactgggtcattgatagttagaaataatatagcaatgaacaatgcacgctataattatattttaagaactaacccatataaattcccatcatctatcctttttgataataattattcaatcagagatgattgggaaaataaaataaaagacttcttaggtgatacagttaacagtgtgaattataaattgcttgtttcacatgaaacaggaccggtacaaaaagatttatttttcacacgagatgatagtggaaatattatctatcctgatttttttcttaatatcattaataaatttaattagacaatgcccattaacctgctgcctaccggaagcaggttattccagaatggacactggcagtaatatatctttgttgacaaaaatataaaattttgttatgggattttatgatgttgaagaaaacgatatttatattaacgttattctctggcaacgtaattgctgcaactgtagaattaggttttgaaaatgagcaatataattatgcttatcgttctgcagatgtcttcatgccgtatattaagagtaatttcaaccctgttactgattctgctttgaatgtgtcactcacctatatgtatcaggatcaatatgggaaaaaacataaaaaaacatctgaggacagatttaaaaccaatcgcgatcgcatagagctctatcttaaaggttatactttaaataggggagcatattctttttctccttccgcaggtttccgttatgagtcatgggatgtaaactacgataatccgaaaaagcaggataagtggaaactggaactacgcttttatcctaatatgacttataaactcaatgaccagttaagcctatatatgaatggttttgttgcccctgtattttttaaaacacaacaagagtcgagaaaagataacaattatgtaaagggtaagttaggggcgaaacgttataacaacgattattatcaggaactccagattctgggtgtcagatataaatttaataatgataatacgctctgggcatcagtctataatgaaagaaaatataatcaacattcctcaaaatatgatcgctggcaattgcgtggaggctatgattttaaagttacagaggagtttgttttgagtccattcataagatatgacctctcttatagagaaaaaaacctcgaaagcacaagtaataatggtttatcaaaaaataataaagaaattcgaactggagccagcttttcctataaaattatcccttctgtaaaactggtaggagaaatatacaggcaaacaaccaacattgaaaactattatggagagcattctgaagacaaaaaccgcatgttctacaaacttggtataaacaaaacattttaaagccatataaagatattttaatataaatatattatataagtcttatcataattataatgtgtttatgggagatattgcagtaacaaaccttcatatattactattagtatagatttttcatgtcagtctggttcagtcagtgtaatatcaggcacatattttgagagagttaaatattatattaatgaagcgcctatagcaggtgcttcattatatcataagagatgatggctaccttgtgttgataagatacagcataataacgattccatttcatttttgttgtagggttgtttaacaaaaaatcttgctaacgggcttaattgatataagccagatattgtattcctgctatggctacattcatcgcgatgtgaagtaatataggcattaataggccattcgactttatttttgcactaataagaactaacgataccagaaataacatcaaaaatgtacgaaagtatgtatattgtagatgcaatgcagagattataactgatgttacaattgcagggatataaatattatcatggaaccagagtttaaaagagttaaaaagacaccctcgaaatacaatctcttcatatacaggaacaagaaatacagaagaaaatattttaatccataaaattgccccagaaaaagacatttgcgaaactatccactcttccgttttccttactcccagaagataagggacaaataattgaataattattaaagagaggagtgtaaaaaacatacagtcgaaaagaacctcttcctaattcttctctttttcggaagaaaataaaatgcagtgaaacaagaattagaaattcagcaagaaataatgctggaacaagaagccccctggatataagttcctgtttgtttgtaatgaatgcagaaataagagtaatagcgaataataaagtaaacattgaaaaacagctggttgatgactgttttttatagttgcatttttaatttttgttgtttttatttatattcccttacttgtcttcttaaattcttttatataacaggaagaggagaccatagcatgaacgtttcttctccggtatcagaacagctataacttttattttatagttgttatcagtgaatgaatgcaaactaatagaacaatgagaaaaagaatggagaaaaagcgacggaccggacgccatagttcatattctcgtgtatcagcctcacgtatcaacctttctgaaatggtttcggtttcctttcctcgcaccagaatatgcctgtaatatttcctcatgacatataccgaaaactgaaaccagattaatatggatggacacacaacacataaacttctgatgatatcacccgggaaagtatcttgggcgggtaaaagaaagtcatatactctgaataaaatcatcatcgagataaatgagacgccagcacctatccagtattcgatatgagaagatgcagcattatatgtgtcagtaaaatttttctttcttaatgaaggtggaagtgctgaaagttcaggaatgctttttcttgtccagtatattttcatatagcaactcatataaaaagtgttctactatgacgatttataaaaggcttataatgactacttcccctttcattctcgaatatcacgataatgatagagataatcattatcaattgatttcgtcagtaattttgacttatatcacacttttataatttaatcaggtgatttatttaataaaaagagagtgtttgtgggtgtcttgtgtatatgtcttactgggcatctgttcttacattaactaatgtattttctgatatcatactcagtctgaatttataatattaacaaatatattactatttaagttttggttgtattgccagtaacattcttttggttaatttagttattattcctcactgattaattgtccttccgttattattgtttgtaacttgtgtttgtatcgtacctttcaggtgttgatgcgcgctttactgtgtctgcaccggcttaacaaaattcaacagggtttgaaaaggaacatttcgtgcaaataaccgaagcattaatttcagagccgggagacatccagcgttttattcaacaggctgtagatcactgactgcgtctgttggccgtccacttcacgcgtcattcgaccagagtaaatattgatgattactagattcgtgtattttatcaggcattttacttgcgaataaatccccttgttatccagcgaaaccacacaggtagctattaccatatgtcgtaatgcactagttacaggaaaaacatgcaggttccgcaatacgttgtgtgttgctgcttagtcaggatcttttcttccatgcgagatacgacaacacttttgaagaaggatgttcgtaactggtagagttactacaacaggcatgggaggctccggctctgacagacattgtactgtggaatgttgttacaggttggggcggcaaccgtgccaggagaccatgagccgttcacggcattaaaggccacacttcagtcgtttacattccctgtggnggcaggcatcttccgttaaggcgtcagagcgttaccaacgttatgttgtcatggctcacctttcatagtcgatgcttatctggtgactgaaactagccgcagataaagagtgtgaagtttataccatggagtggagtgacgtgcaggcaggagattcgctctatgcagggttgtgagatgaattcaaaccggctgtcagcgccagtgatatttgaagattcgtccggttgttatccagtgtgcattaaaaacccagacattatggacaatacaacggcttccataacagggaggagcctgtttattatccgggcgtaatgactcacccttgtgggctttttcccgtcgcgcttttaacgttgaaggcattttctgcctgccgattcaggacagcgacaaaagccatatcagactattggtcaatgatgaccagcgtctggagtagatgataagccaaattgataagctggaatatgtgatgaaagtgcaacgtaatcagtccaatccgacgatgtttaacaagagtacggtgttttttcagtaagtcattcgtcttctgaatcaggtgtaatgacctttacagaagcattccggcagtgcgtaacataatctgccggtaacggacgatcgctaatcagaacatcaaatgcagagagcggtgcgaggctggcagaggctacttcatcgaacaaggcgtggcgggcgagcaaaattttccttagtccacgggccatcgctttacgcttagtggcaagatcttcgggattaaaccagctgacgccaaagtgatcatgtacaccgctggcggaaataaatatttttcgcggattgagagagtctaatggcgaagagttactggcatcgtaaaaagcatcacttctggcacgatacgtaccaccacaaagtattgctgtcacattaggtttttcattcaacgcaacaaagacacgatgtgagtaacagatgccagtgaaggtgattgcatccgggatcatgcttataacgagcggtatctcctggccattatcaaagaagatcagatcattttcattaaccattccggcggccagaattgcaataggtaagtcatcacgatgatttctcggaacgtcctggattactggcatggatggtgcgggtttatgcaccattacaatatagccacccagtagggtcagtggcagaggttcatcttcctgatggagatcgcgacgaatagtcattacagaaacttccagcattcgtgccgcgtctttcaaatggattctgtcggttttcttaagtatttcaatcaaacgtcggatacgctctttttgcttcgtttccatcaactctctctccgtaaaaatgttataaaaataacattatggcattagtaaacattgttttagttaccatactatacgaccgaccctttgaaatgaaaagggtatagactgctgaattttcggtattaatcctgttaggttgcttatgattagatagtgttggcctgagtgataagactggaagtctattaaataaacatcgggttgatgtgctaatcgcgatctcagtcacaaatgatgcaaaagtaacatgctaatgttatttaaataccattgttatgcgaaagtttataagaggtagtgaaatggacattgcagttattggttccaatatggtggatctcattacttacacgaatcagatgcctaaagaaggagaaactctggaagcacctgccttcaaaatcggatgtggtgggaaaggtgctaatcaagcggtggcggcggctaaattgaattcaaaagtcctgatgctgactaaagtaggtgatgatatttttgcggataatactattcgtaatctcgaatcatggggaattaataccacttatgttgagaaggtcccctgtaccagcagtggtgttgcaccgatctttgttaatgccaactcgagcaatagtatattaataattaagggagcgaataaatttctttccccggaagatatcgatcgagctgcagaagatctgaaaaaatgcaaattgatcgttttacaactggaagttcaactggaaacagtttaccacgcgattgagtttggtaagaaaaatggtattgaagtgttattaaatccggctccggcattgcgtgagttagatatgtcttatgcctgcaaatgtgatttctttatcccgaatgaaacagaactggaaatattaaccggtatgtcggttgatacttatgatcatattcgtttggccgcacgttcgttagttgataaagggctgaacaatattattgttaccatgagcgaaaaaggcgcattatggatgacccgtgatcaggaagtccatgttcctgcattcaaagtaaatgctgttgatactagtggcgctggtgacgcatttattggttgcttttcccattattatgttcaaagcggtgatgttgaagccgctttgaaaaaagccgctctctttgccgctttcagcgtcacagggaaaggtacgcaatcatcttatccgagtattgaacaatttaatgaatttttaaccttaaacgaataatcatcctgcacagttaaaggtagcactatgaacgataaaaacatcattcagatgcctgatgggtatctgaataagactcccttgttccagtttattttgttatcgtgtttattcccgctatggggatgcgcagctgcattaaatgacatattaatcactcaattcaaaagtgtattttcgctaagtaactttgcttcagcattggtgcagagcgcattttatggaggttattttttaattgcaataccagcatcccttgtgattaaaaagaccagttataaggtggcaattttaattggcctgacgctgtatattggtggttgtacactttttttccctgcctcacatatggcaacctacactatgttccttgcagctatttttgcgattgcgattggcctgagtttccttgaaactgcagcgaacacatacagttcaatgatcggtccaaaagcctatgccacattgcggctcaatatcagccagaccttttatccgattggtgctgcgtctggtattttattgggcaaatatctggttttctccgagggggaaagccttgaaaagcagatgtcaggaatgaacgccgggcaaattcacaactttaaggtgctgatgttagagaacacccttgaaccgtataagtatatgattatgattctggttgtggtcatggtgttgttccttttaacccgcttcccaacctgtaaagtggcacagacaagtcaccataaacgcccgtcagcaatggatacgctgcgctatctggctagaaatccgcgctttcgtcgcggtattgtggcgcagttcctttatgtgggtatgcaggtcgcagtatggtcatttaccattcgtctggcgctggagttgggcgatatcaacgaacgtgatgcttcaaacttcatggtctatagctttgcctgcttctttattggcaagtttatagccaacatccttatgacgcgttttaatccggaaaaagtattgattctctattccgttataggggcgctgttcctggcatatgttgcactggctccaagtttcagcgcggtctatgtcgccgtcctggtaagtgttttgtttggcccttgctgggcgacgatctatgcaggaacactggatacagttgataacgaacatacagaaatggcaggagcagtcattgttatggctattgtcggtgccgcggtggttccagcaattcagggatatattgcagatatgttccactcactacagctttcattcctggtttctatgctctgctttgtctatgtcggagtctacttctggcgtgaaagcaaagtacgtaccgcactggctgaagtcacagcgtcctgaggagaaccgttatgagtacgcgtattaatttgtggcgggcgctttttggcgagaaacctcgtatcttgctggaaaatagtgattttactgtcacgtcttttcgctatgacagcggtgtcgaggggcttaaaattgcaaacagtcgtggacatttgattattcttccctggatggggcagatgatttgggatgcgcaatttgatggacacggcctcaccatgtgcaatatgtttcgccagcctaaaccggcgacagaggtgatagagacctatggctgttttgcttttcattcaggtttgctggctaatggctgcccatctgcggaagatactcatctgctacacggtgaaatggcctgtgccgcgatggatgaagcatggctggaattagacggagatatgttacgccttaacgggcgttacgagtatgtaatgggtttcggtcatcattatctggctcaaccaacagtggtccttcacaaatcctctacactgttcgatattaagatggccgtaaccaatctggcttctgtagatatgccactacaatatatgtgccacatgaattatgcatatataccaaatgctacattcagccagaatatcccggacgaaatattaagattgcgtgaatcagtgccttcgcatgttaatcccaccgctcagtggctggcgtttaatcaacggattatgcagggagaagcctctctgtcgacgctgagtcaaccggaattttatgatccagaaattgtcttctttgcagacaaactggacgcttatacagatcagccagagtttcgcatgatctctcccgatggcactacgtttgttactcgtttctacagtgctgaactaaattatgtgacacgctggatcctttataacggagagcaacaggtagccgcctttgcattacctgcaacctgtcggcctgaggggtatcttgccgcgcaacgtaatggcacgctgattcaggttgcaccgcagcaaacgcgcacttttacagtcaccacaggaattgaataaccactcaaggcctgaacagcggcgcgcttatcgttaaggtaagcgcgcttttttacccgccaggacaagactatgatagcgttgcccttatagacgatcacattatcgtccactccaaatttgcgcaactactgtagagtggtgtactccacagcttctttgaggatctcaacttccattgttttcttaccgagcaagcactgcaactcttttatttatttgtagtggtcaacaaaaactggtcacaatttcagtttttttccagtatctattttccgattcgttcggcggtaatccaccgttatattcatgaggccggagtgcactataaaagtgtatgcgtaaaccgactgctgtatgtagccattaagccagtattggtaacataggtacccaccttttcaactagtggacacctgttatggaacaaaaaacattatcagctgaaccccgcaggtcattttcaaatgagtttaaacttcaaatggttacactggctttacaaccaaggggttctgttgcccgtattgcccgggagcatgatatcaatgataatcttctgttcaaatggctcaggctctcgctgatcaaagggcgtatatcacggcgtcttccgttaacgaactcttctggcattggcgttgaattattacctgtggagatgacgctgggatgagcggccttaccccgttttttacgcgaggtaattatgaagatcaatgactagccgtcgaaccgtgtgcatgaactgctgcactgaaacttctcagctgtaaaataatccttacgctacgtacttctcggagcgcttacaattaatcggatgcagtcctgactggaagaaagaaaaatggagaaaacaagaggaattaatatcctccacgttcctgaaatcctggaggatattaatgtcatcaaaatattagcgaacgataatccctaacaaaatacccagtgcgccaaagtcagcatcactgaaggtggtgttagcaaaaccaatatcacccagcaccggcaataagaatactggcaggaaggtaataagcaagccttgagcgaaggcacccaaaatcgcaccacgacgtccacccgttgcattaccgaatacccctgcagctgcacctacgaagaagtgcggcaccacaccaggaataatcacgatcatgttcagcagatacaacgtgaacataccgattaaacctgcagcaaagctactcaggaaaccaaccagtacagcgttaggtgcgtaagggaagacgaccgggcaatcgagagcaggtctggcattcggaaccagcttgtctgaaatacctttgaatgccgggacaatctccgcaatcaccatgcgcacaccctgcagaatgatgtacacgccagctgcgaaggtaatggattgcatgatagagaacatgaaccagtttttaccaccgctaagctctttcaccgcatctgcacccgcaaacaggcacgtcaccaggaaaattatgctcatggtaaaagagatagcaaccggcgtgtcgcgcaagaacagcagacttttcggcacattcatgtcttcagtcgagtgctctttattaccaaacttgctgccgatgaaaccggccaatacataagataatgttgagaagtggccgatggcaacgtcatcagaaccggtcactttcttcatgtacggatgcgcaatagccgggaaaaagaccattgccacgccaacaaccaaagagccaacggctataagcgtaacgccggtcatgcctgctgttgccagaattaccgctaccatcatcgacataaacaacgtgtgatgaccggtcaggaagataaatttccacggtgtgaaacgggcaatcataatgttgataaccatcgcaaagaacataatcatcgccatttctttcccgaagcttttctgcgctacggaaacaatggcttcattgttcggcacgacaccctgaataccaaaggcatgctggaaaatgtttgcgaagtcacccagtgacgacacaactaaacccgcccctgcgcctaaaatcacaaaccccataatggtcttgacggtacctttaatgcattcggttaccggttttttctgtgcaatcaggccaatcagggcgattaaaccgaccagcaccgcgggttcggaaagtacatcgctcatcaaaaaacgaaagaaatccatatcgcccccagcttacagtgcgcctaattcggttaatgccacggacaaacgttctctcatggctttcttatcaatcatattttccagggcgacgattttgcctgcgacagactgcgcgactaactgctcggcaatatctttggtgccgacatagatatcactcggcgtccctttcgcggagcccaggtcgacatgatcaacatcagcgctgatggacaaatccttcaaaatgcttttaatgctcatttccatcatcaggctggtgcctaagccgttaccgcaaaccactgtaattttcataaatgttcctcagaattaatagcgcgcaataacagacaaaatgtcctgcgtcgttttggccgtcaaaatagcctgtatgtctttttcgttatcgaataacttggcgagttgagaaatcgcttcaatgtggctggtactgtcggttgcagccagcacaatcagtaatttcactggatcgttttcatcggcatcaaaattcacacctgaagggatcagggtcagtgctaatgacagcttgttagccccctcttccgggcgcgcatgaggcatcgcaataccagggccaaccacatagtacggaccgatagtgtcgtgcgagtgatagatcgcatcaacataacgcggttcgatagaaccgttttcaatcaacggtcggcatgaaatcgccacggcttcccgccagtctttgacctgttccacgacctgaacgacctctgtatttaatagattttttaacatacgactgataactcccgatgataattaacaggagagtagatattttacgcattaattaatgtgatgattgtcgcatttgatagcgctatctgataacgctaccaatctttgtgatagcgctatcatttctctgccgccatgctttggctatattcggttcctgcatatacaatgcaacaggatatttgctaccgtgggcaaaaactggaaagagtaatggtaaaataaaagtaatgaaaacagctggttgtaattatccatggagtcgaaatggaaaaaacacgtaagcgccgtggtaccggacgggtgacgctgcaggaggtcgctaactttgcaggtgtcggaaccatgaccgtctcccgcgcgctgagaacaccggaacaggtttctgacaagctgagggaaaagatagaacaggccgtagaagagttgggttatattcccaacagaactgctggcgcccttgcatctggtcacagtcatacagtcgccgtactggttccttccctgacagataaagccagctcccgctttatgcagtcgttgcagcaggtgcttaataaaaatgaattccagctactgcttgggtgtcatgagtataatcagctcaaagaagctgaaattctgatgacgcttcttcaaggcaacccggcggcgttagttatttttggttctcagttggctgataaaactcaccagatactcgagaaaacnnnntatacctaccgttaacgttgtcggttcccctttcagtccggctcaaattaccatcgaaacagcattttttgaagcatcacataaactgaccgaacatctgctggagcagggttataagaatatcggatttatcggtgcgcatatggaaaaccgcctgcaacgtcagcaactgaacggctggcataaagcaatgctgagccattaccagaacactgatcttgttatcacaatgccggatgccgcaagtctgcaattggggcgttacgcattaaacgagatattactgcgacaaccagagctggatgctgtgatttgcagccacgaagagattgcgctgggtatcatgtttgagtgtcagcggcgtttgttaaaaatccctggaaatatcgctgtagcttgtcttgacggttcagacagttgcgatcaaacacacccaaccttgacatccatccgtattgactacaaaaaaatggggatagagacgggtaagttactgattggactattgaataataatcatgatgaatcagaagagtcgcgtatcgtgcaattcaactaccagatagaattacgtcagagtacatgagcctaaaagggcactattgcaaagttagctattgtggtagggatagccgtttccggctattccccgcgcagatccggatgtgtgctgctaacgcatccattcctacttcaggtatttggcgtagaagcggatgctaaaaacttgccgtaaaaccgcaatatcagcccgcagtgtcgctctccagattatccattcctatattgatgacaacgacacgtaagactgtgactcaccaaacttggatgtttttctgagcttaaagctcgttgcgtgaataaggcgagagtcagcgaatctcatcgaggcccgcagcaccggctgcaatagggatatagagcagcaatctaccgtcaacgtcaaaaacacggaagccttgcaaacgggatgcgttcatataaacaacatggagcagcaacaatacgatgcctgttgttgctcagtcaggaccttttctgccatgcgcgagccagcgtcacgattgatgaagaatgttctcaactgattaatttactgcaacagacgtggctggtaataagcgctggcggacaatgcagggtgaaaggctgttttcgggttgtccggcctgatacatcagagcaatacgttgcgttaaaaacggctgttcagtctctgatgccacgggggtattgcaacaatcatccggtgatggacgggagaaatatcgactcttccgttagtttttacagactgataaagttttgccaggctgaatctttatacggaatgctcttcagtatgcatatacgaattgactatctggcggataaaaactgctttacagaactgaatgaatctccacgccttcgccggcagtggcaggatgttctggaggagtgccggcagacagaggccgggccagaagaacggctgcgtattgctctgctgaatgtggattacgtcaccagttttgaactgccttttcgcttgttgcttactcgtacaccacaactgattgccgcgctgcgtgaagaatgggacatcagccagaaaaatgtggtgttcaacgataaacgctttggctgcgtgtacaacctgaaggccagcctttcgggtgggccggatacattccggtatcatctgtctcaccgtattcggcgggtggttgcgaatgaaaacacatcatcgccataccaactgattgcccgggaagtgaaagcgccccgtcaacggctgaagtatgcgctggagacaggattgcaggtgagcgcactggacggcctgttctggttcggcagccagcgcattgcggcagatatcctgaggctgagaaagtacgggatgcggattgcgacggcttctgtggacgtgtatgacaacataaccggaacaactcgtcatatccctgtatattactcctgacgcaaaatagtctgtgggggccggagcatgaccggtaaccggaacagggttttgccctcgtcacagccaaaaatacgtcctttatcacatttcttcgatttttcctgatattttaccgggttactgttcaaaaatgcttctcttctgatgtaaatttctttactgacactttttgacatgaatttacactggcatcacacaggccagaatacggggagaacatgcagcaccggcagaaaaacattctgacgaaaacgtcccttttatcccgtgcgttgtctgtcccctgttgtgatatgttccggcgcggctctccgtggatatgctatctctccctctccgttttttctggttgtttcatccccgcattttcgtctccggcagccatgctgtctccgggtgaccgcagtgcaattcagcagcaacagcagcagttgctggatgaaaaccagcgtcagcgtgatgcgctggagcgcagtgcnccgctgaccatcacgccgtctccggaaacgtctgccggtactgaaggtccctgctttacggtgtcaagcattgttgtcagtggggccacccgactgacgtctgcagaaaccgacagactggtggcnccgtgggtgaatcagtgtctgaatatcacggggctgaccgcggtcacggatgccgtgacggacggctatatacgccggggatatatcaccagccgggcctttctgacagagcaggacctttcagggggcgtactgcacataacggtcatggaaggcaggctgcagcaaatccgggcggaaggcgctgaccttcctgcccgcaccctgaagatggttttcccgggaatggaggggaaggttctgaacctgcgggatattgagcaggggatggagcagattaatcgtctgcgtacggagccggtacagattgaaatatcgcccggtgaccgtgagggatggtcggtggtgacactgacggcattgccggaatggcctgtcacagggagcgtgggcatcgacaacagcgggcagaagagtaccggtacggggcagttaaatggtgtcctttcctttaataatcctctggggctggctgacaactggtttgtcagcgggggacggagcagtgacttttcggtgtcacatgatgcgaggaattttgccgccggtgtcagtctgccgtatggctataccctggtggattacacgtattcatggagtgactacctcagcaccattgataaccggggctggcggtggcgttccacgggagacctgcagactcaccggctgggactgtcgcatgtcctgttccgtaacggggacatgaagacagcactgaccggaggtctgcagcaccgcattattcacaattatctggatgatgttctgcttcagggcagcagccgtaaactcacttcattttctgtcgggctgaatcacacccacaagtttctggggggggtcggaacactgaatccggtattcacacgggggatgccctagttcggcgcagaaagcgaccacgggaaaaggggagacctgcccgtaaatcagttccggaaatggtcggtgagtgccagttttcagcgccccgtcacggacagggtgtggtggctgaccagcgcttatgcccagtggtcaccggaccgtcttcatggtgtggaacaactgagcctcgggggtgagagttcagtgcgtggctttaaggatcagtatatctccggtaataacggcggttatctgcggaatgagctgtcctggtctctgttctccctgccatatgtgggaactgtccgtgcagtggctgcactggacggcggctggctgcactctgacagcgatgacccgtactcgtccggcacgctgtggggtgctgctgccgggctcagcaccaccagtggccatgtttccggttcgttcactgccggactgcctctggtttacccggactggcttgcccctgaccatctcacggtttactggcgcgttgccgtcgcgttttaagggattattaccatgcatcagcctcccgttcgcttcacttaccgcctgctgagttacctggtcagtgcgattatcgccgggcagccgttgttaccggctgtgggggccgtcatcaccccacaaaacggggccggaatggataaagcggcaaatggtgtgccggtcgtgaacattgccacgccgaacggggccgggatttcgcataaccggtttacggattacaacgtcgggaaggaagggctgattctcaataatgccaccggtaagcttaatccgacgcagcttggtggactgatacagaataacccgaacctgaaagcgggcggggaagcgaagggtatcatcaacgaagtgaccggcggtaagcgttcactgctgcagggctatacggaagtggccggcaaagcggcgaatgtgatggttgccaacccgtatggtatcacctgtgacggctgtggctttatcaacacgccgcacgcgacgctcaccacgggcaaacctgtgatgaatgccgacggcagcctgcaggcgctggaggtgactgaaggcagtatcaccatcaatggcgcgggcctggacggcacccggagcgatgccgtatccattattgcccgtgcaacggaagtgaatgccgcgcttcatgcgaaggatttaactgtcactgcaggcgctaaccgtgtaactgcagatggtcgtgtcagagccctgaagggcgaaggtgatgtgccgaaagttgccgttgataccggcgctctcggtggaatgtacgccaggcgtattcatctgacctccactgaaagtggtgtcggggttaatcttggtaacctttatgcccgcgatggcgatatcaccctggatgccagcggcagactgactgtcaacaacagtctcgccacgggggccgtcactgcaaaaggtcagggcgtcaccttaaccggcgaccataaagcgggaggtaacctgagcgtcagcagccggagagatatcgttctcagcaatggaacgcttaacagcgacaaggacctcagcctgaccgccggcggcagaatcactcaacagaatgaaaaactgactgccggccgggatgtaacgcttgccgcgaaaaacatcacacaggataccgccagccagattaacgcggcccgcgatatcgtgactgtcgccagtgacacgctgacaacacagggacagataaccgccgggcagaatctcacggccagcgccaccacgctgacgcaggacggaatattgctggcgaaaagtcatgcgggactcaatgccggtacgctgaataacagtggcgccgttcagggagctaccctgacgctcggcagtacaacgctcagcaacagtggctccctgctcagtggcggtcccctgaccatgaatacccgcgactttacccagagcggccgcactggcgcgaagggcaaagtggatatcatggccagtgggaaactgaccagtacaggtttgctggtgacgatnatgcacttggtgctgaaggcgcaggatgtgacacagaacggtgtgctgtccggcggcaaagggctgacggtcagtgcgcanacgntgagctccggtaaaaaatcggtcacccacagcgatgctgcgatgacgctgaatgtgacaacagtggcgctggacggggaaaccagtgccggtgacaccctccgggttcaggcagacaaactgagtaccgcagcgggcgcacaacttcagagcggcaaaaatctcagcatcaacgccagagatgcacgtcttgcaggtacgcaggcagcacaacagaccatggtggtgaacgccagtgaaaagctcacccacagcgggaaaagcagtgccccgtcgctcagcctcagtgcgccggaactgaccagcagcggcgtacttgttggttccgccctgaatacacagtcacagaccctgaccaacagcggtctgttgcagggggaggcctcactcaccgttaacacacagaggcttgataatcagcagaacggcacgctgtacagtgctgcagacctgacgctggatataccggacatccgcaacagcgggcttatcaccggtgataatggtttaatgttaaatgctgtctccctcagcaatccgggaaaaatcatcgctgacacgctgagcgtcagggcgaccacgctggatggtgacggcctgttgcagggcgccggtgcactggcgcttgctggcgacaccctctcacagggtagtcacggacgctggctgacggcggacgacctctccctccggggcaaaacactgaataccgcagggaccacgcagggacagaatatcaccgtgcaggcggacagatgggcgaacagtggttccgtgctggcaaccggtaaccttactgcttcggcaaccggtcagttgaccagtaccggcgatatcatgagccagggtgacaccacgctgaaagcagccaccacggacaaccggggcagtctgctttcggccggcacgctctcccttgatggaaattcactggataaccgcggcactgtccagggtaaccatgtcacgattcgccagaacagtgtcaccaacagtggcacgctcaccgggatcgccgcactgacgcttgccgcccgtatggcatcccctcaacctgcgctgatgaataacggaggttcattgctgaccagcggcgatctgacaatcaccgcaggcagtattaccagttccggacactggcagggcaaacgggtgctgatcaccgcagacagtctggcaaacagcggggcgatccaggcggctgacagcctgactgcacgtctgacgggtgagctcgtcagcacagcgggcagcaaagtcacctcgaacggtgaaatggcgctcagtgcactgaatttaagcaacagcggacaatggattgcaaaaaatctgaccctgaaggcgaactcactgaccagtgcgggtgacatcaccggtgtggatactctcacgctcacggtgaatcagacgctgaacaatcaggcgaacggaaaactgctcagtgcaggtgtgctgacgctgaaggcagacagtgtcacaaacgacgggcaattacagggaaatgtcaccaccatcacggcaggacaactcacaaacggcgggcatctgcagggcgaaacgctgacgctgacagcctccggtggcgtgaacaaccgttccggtggtgttctgatgagccggaatgcactgaatgtcagtactgcgaccctgagtaaccagagcacgatacagggtggaggcggggtttccctgaacgccacagaccgtctgcagaacgacggcaaaatcctctccggcagtaacctcacgctgacggcgcaggtgctggcgaacaccggcagcggactggtacaggctgccaccctgctgctggatgtggtgaatactgtcaacggcggacgcgtacttgccaccggcagtgcngacgttaaaggaaccacgctgaataataccggtacgcttcagggtgcgnacntgctggtgaattaccacacattcagcancagcggtaccctgctgggaacctccgggcttggcgtcaagggcagttcactgctgcaaaatggtacagggcggctgtacagtgcaggcaacctgctgcttgacgctcaggacttcagtggtcaggggcaggtggtggccaccggtgatgtcacactgaaactgattgctgccctcacgaatcatggtaccctggccgcagggaaaaccctttccgtcacgtcgcaaaatgccatcaccaacggcggtgtcatgcagggtgatgccatggtgctcggtgccggagaggcattcaccaacaatggancgctgactgccggtaaaggcaacagtgttttcagcgcacagcgtcttttccttaacgcaccgggttcacttcagggcggtggcgatgtgagtctgaacagccggagtgatatcaccatcagtggttttaccggcacggcaggcagtctgacaatgaatgtggccggtaccctgctgaacagtgcgctgatttatgcggggaataacctgaagctgtttacagaccgtctgcataaccagcatggtgatatcctggccggcaacagtctgtgggtacagaaggatgcttccggcggtgcaaacacagagattatcaataattccgggaatattgagacgcatcagggcgatattgttgtaagaaccgggcatcttctgaaccagcgggagggattttctgccacaacaacaacccggactaacccctcatccattcagggaatgggaaatgctctggttgatattcccctttcccttcttcctgacggcagctatggctatttcacccgtgaagttgaaaatcagcacggtacgccctgcaacgggcacggggcatgcaatatcacaatggatacgctttattattacgcgccgtttgctgacagtgccacacagcgctttctcagcagccagaacatcacaacagtaaccggtgctgataatccggcaggccgcattgcgtcagggcgtaatctttctgctgaggctgaacgactggaaaaccgggcgtcatttatcctggcgaatggggatatcgcactctcgggcagagagttaagcaatcagagctggcagacggggacagagaatgaatatctggtataccgctacgacccgaaaacgttttacggtagctatgcaacaggctctctggataaactgcccctgctgtcaccggaatttgaaaacaataccatcagattttcactggatggccgggaaaaagattacacgcccggtaagacgtattattccgttattcaggcgggcggggatgttaagacccgttttaccagcagtatcaataacggaacaaccactgcacatgcaggtagtgtcagtccggtggtctctgcacctgtactgaatacgttaagtcagcagaccggcggagacagtctgacacagacagcgctgcagcagtatgagccggtggtggttggctctccgcaatggcacgatgaactggcaggtgccctgaaaaatattgccggaggttcgccactgaccggtcagaccggtatcagtgatgactggccactgccttccggcaacaatggatacctggttccgtccacggacccggacagtccgtatctgattacggtgaacccgaaactggatggtctcggacaggtggacagccatttgtttgccggactgtatgagcttcttggagcgaagccgggtcaggcgccacgtgaaacggctccgtcgtataccgatgaaaaacagtttctgggctcatcgtattttcttgaccgcctcgggctgaaaccggaaaaagattatcgtttcctgggggatgcggtctttgatacccggtatgtcagtaacgcggtgctgagccggacgggttcacgttatctcaacggactgggttcagacacggaacagatgcggtatctgatggataacgcggccagacaacagaaaggactgggattagagtttggtgtggcgctgacagctgaacagattgctcagcttgacggcagcatactgtggtgggagtcagtcaccatcaacggacaaacagtcatggtcccgaaactgtatctgtcgccggaagatatcaccctgcataacggcagcgttatcagcgggaacaacgtgcaacttgcgggcggcaatatcaccaacagcggcggcagcatcaacgcacagaacgacctctcgctcgacagttccggctatatcgacaacctgaatgcggggctgataagcgcgggcggtagcctggacctgagcgccatcggggatatcagcaatatcagctcagtcatcagcggtaaaaccgtacaactggaaagcgtgagtggcaacatcagcaatatcacccggcgtcagcaatggaatgcgggcagtgacagccaatatggtggtgtgcatctcagcggtacggacaccggtccggttgcgaccattaaaggcactgattcactttcgctggatgcagggaaaaacattgatattaccggggcaacggtctcgtccggtggagaccttggaatgtctgcgggtaatgatatcaacattgccgcaaacctgataagtgggagcaaaagtcagtccggtttctggcacactgatgacaacagttcatcatccaccacctcacagggcagcagcatcagcgccggcggtaacctggcgatggctgcaggccataatctggatgtcacggcatcctctgtttctgccgggcacagcgccctgctttcttgcaggtaacgacctgagtcttgaatgcagtcagggaaaagcaaaaacaagtcgcaacggcaggtcagaaagtcatgaaagccacgcagctgtgtccacggtgacagcgggcgataacttcctccttgttgccggtcgtgatattgccagtcaggctgccggtatggctgcggaaaataacgtggtcatccggggcggacgtgatgtgaacctggtggcagagtctgccggcgcaggcgacagctatacgtcgaagaaaaagaaagagattaacgagacagtccgtcagcagggaacggaaatcgccagcggtggtgacaccaccgtcaacgcaggacgggatatcaccgctgttgcgtcatccgttaccgcaaccggcaatatcagcgtgaatgccggtcgtgatgttgccctgaccacggcgacagaaagtgactatcactatctggaaacgaagaaaaaaagcggaggttttctcagtaagaaaaccacccgcaccatcagtgaggacagtgccacccgtgaagcaggctccctgctgtcggggaaccgcgtgaccgttaacgccggtgataacctgacggtagagggttcggatgtggtggctgaccgggatgtgtcactggcggcgggtaaccatgttgatgttcttgctgccaccagtacagatacgtcctggcgctttaaggaaacgaagaaatccggtctgatgggtaccggcggtattggtttcaccattggcagcagtaagacaacgcacgaccggcgcgaggccgggacaacgcagagtcagagtgccagcaccatcggctccactgccggtaatgtcagtattaccgcgggcaaacaggctcatatcagcggttcggatgtgattgcgaaccgggatatcagcattaccggtgacagtgtggtggttgacccggggcatgaccgtcgtactgtggacgaaaaatttgagcagaagaaaagcgggctgacggttgccctttccggcacggtgggcagtgccatcaataatgcggttaccagtgcacaggagacgaaggagagcagtgacagccgtctgaaagccctgcaggccacaaagacagcgctgtctggtgtgcaggccggacaggctgcgacaatggcctccgcaaccggtgacccgaatgcgangggagtcagcctgtcgctcaccacccagaaatcgaaatcacaacaacattctgaaagtgacacagtatccggcagtacgctgaatgccgggaataatctgtctgttgtcgcaaccggcaaaaacaggggcgataaccgcggagatattgtgattgcaggaagccagcttaaggccggtggtaacacaagcctggatgccgcgaatgatattctgttgagtggcgccgcaaacacacaaaaaacaacgggcaggaacagcagcagtggcggtggcgtgggtgtcagtatcggtgcaggtaaaggtgccggtatcagcgcctttgccagcgttaatgcggcaaaaggcagggagaaaggtaacggtactgannggactganaccanancngacagnngtaaaaccgtcaccatcaacagtggtcgggatacggtactgaacggtgctcaggtcaacggcaacaggattatcgccgatgtgggccacgacctgctgataagcagccagcaggacaccagtaagtacgacagtaaacagaccagcgtggctgccggcggcagttttacctttggctccatgaccggctcaggttacatcgctgcctcccgggataagatgaagagccgctttgactccgttgctgaacaaaccggaatgtttgcccggtgatggtggcttcgacatcacagtgggtaaacatacccaactggatggtgcggtgattgcctncactgccacaccggataaaaaccacctggataccggacgctgggtttnagtgactttacaacgaagcgggattataaagtcaagtcacaggtggaatcagtctga

SEQ ID NO: 1118 - DNA, 8198 bp, Escherichia coli
atgcatcagcctcccgttcgcttcacttaccgcctgctgagttacctggtcagtgcgattatcgccgggcagccgttgttaccggctgtgggggccgtcatcaccccacaaaacggggccggaatggataaagcggcaaatggtgtgccggtcgtgaacattgccacgccgaacggggccgggatttcgcataaccggtttacggattacaacgtcgggaaggaagggctgattctcaataatgccaccggtaagcttaatccgacgcagcttggtggactgatacagaataacccgaacctgaaagcgggcggggaagcgaagggtatcatcaacgaagtgaccggcggtaagcgttcactgctgcagggctatacggaagtggccggcaaagcggcgaatgtgatggttgccaacccgtatggtatcacctgtgacggctgtggctttatcaacacgccgcacgcgacgctcaccacgggcaaacctgtgatgaatgccgacggcagcctgcaggcgctggaggtgactgaaggcagtatcaccatcaatggcgcgggcctggacggcacccggagcgatgccgtatccattattgcccgtgcaacggaagtgaatgccgcgcttcatgcgaaggatttaactgtcactgcaggcgctaaccgtgtaactgcagatggtcgtgtcagagccctgaagggcgaaggtgatgtgccgaaagttgccgttgataccggcgctctcggtggaatgtacgccaggcgtattcatctgacctccactgaaagtggtgtcggggttaatcttggtaacctttatgcccgcgatggcgatatcaccctggatgccagcggcagactgactgtcaacaacagtctcgccacgggggccgtcactgcaaaaggtcagggcgtcaccttaaccggcgaccataaagcgggaggtaacctgagcgtcagcagccggagagatatcgttctcagcaatggaacgcttaacagcgacaaggacctcagcctgaccgccggcggcagaatcactcaacagaatgaaaaactgactgccggccgggatgtaacgcttgccgcgaaaaacatcacacaggataccgccagccagattaacgcggcccgcgatatcgtgactgtcgccagtgacacgctgacaacacagggacagataaccgccgggcagaatctcacggccagcgccaccacgctgacgcaggacggaatattgctggcgaaaagtcatgcgggactcaatgccggtacgctgaataacagtggcgccgttcagggagctaccctgacgctcggcagtacaacgctcagcaacagtggctccctgctcagtggcggtcccctgaccatgaatacccgcgactttacccagagcggccgcactggcgcgaagggcaaagtggatatcatggccagtgggaaactgaccagtacaggtttgctggtgacgatgcacttggtgctgaaggcgcaggatgtgacacagaacggtgtgctgtccggcggcaaagggctgacggtcagtgcgacgagctccggtaaaaaatcggtcacccacagcgatgctgcgatgacgctgaatgtgacaacagtggcgctggacggggaaaccagtgccggtgacaccctccgggttcaggcagacaaactgagtaccgcagcgggcgcacaacttcagagcggcaaaaatctcagcatcaacgccagagatgcacgtcttgcaggtacgcaggcagcacaacagaccatggtggtgaacgccagtgaaaagctcacccacagcgggaaaagcagtgccccgtcgctcagcctcagtgcgccggaactgaccagcagcggcgtacttgttggttccgccctgaatacacagtcacagaccctgaccaacagcggtctgttgcagggggaggcctcactcaccgttaacacacagaggcttgataatcagcagaacggcacgctgtacagtgctgcagacctgacgctggatataccggacatccgcaacagcgggcttatcaccggtgataatggtttaatgttaaatgctgtctccctcagcaatccgggaaaaatcatcgctgacacgctgagcgtcagggcgaccacgctggatggtgacggcctgttgcagggcgccggtgcactggcgcttgctggcgacaccctctcacagggtagtcacggacgctggctgacggcggacgacctctccctccggggcaaaacactgaataccgcagggaccacgcagggacagaatatcaccgtgcaggcggacagatgggcgaacagtggttccgtgctggcaaccggtaaccttactgcttcggcaaccggtcagttgaccagtaccggcgatatcatgagccagggtgacaccacgctgaaagcagccaccacggacaaccggggcagtctgctttcggccggcacgctctcccttgatggaaattcactggataaccgcggcactgtccagggtaaccatgtcacgattcgccagaacagtgtcaccaacagtggcacgctcaccgggatcgccgcactgacgcttgccgcccgtatggcatcccctcaacctgcgctgatgaataacggaggttcattgctgaccagcggcgatctgacaatcaccgcaggcagtattaccagttccggacactggcagggcaaacgggtgctgatcaccgcagacagtctggcaaacagcggggcgatccaggcggctgacagcctgactgcacgtctgacgggtgagctcgtcagcacagcgggcagcaaagtcacctcgaacggtgaaatggcgctcagtgcactgaatttaagcaacagcggacaatggattgcaaaaaatctgaccctgaaggcgaactcactgaccagtgcgggtgacatcaccggtgtggatactctcacgctcacggtgaatcagacgctgaacaatcaggcgaacggaaaactgctcagtgcaggtgtgctgacgctgaaggcagacagtgtcacaaacgacgggcaattacagggaaatgtcaccaccatcacggcaggacaactcacaaacggcgggcatctgcagggcgaaacgctgacgctgacagcctccggtggcgtgaacaaccgttccggtggtgttctgatgagccggaatgcactgaatgtcagtactgcgaccctgagtaaccagagcacgatacagggtggaggcggggtttccctgaacgccacagaccgtctgcagaacgacggcaaaatcctctccggcagtaacctcacgctgacggcgcaggtgctggcgaacaccggcagcggactggtacaggctgccaccctgctgctggatgtggtgaatactgtcaacggcggacgcgtacttgccaccggcagtgacgttaaaggaaccacgctgaataataccggtacgcttcagggtgcgactctggtgaattaccacacattcagcagcggtaccctgctgggaacctccgggcttggcgtcaagggcagttcactgctgcaaaatggtacagggcggctgtacagtgcaggcaacctgctgcttgacgctcaggacttcagtggtcaggggcaggtggtggccaccggtgatgtcacactgaaactgattgctgccctcacgaatcatggtaccctggccgcagggaaaaccctttccgtcacgtcgcaaaatgccatcaccaacggcggtgtcatgcagggtgatgccatggtgctcggtgccggagaggcattcaccaacaatggactgactgccggtaaaggcaacagtgttttcagcgcacagcgtcttttccttaacgcaccgggttcacttcagggcggtggcgatgtgagtctgaacagccggagtgatatcaccatcagtggttttaccggcacggcaggcagtctgacaatgaatgtggccggtaccctgctgaacagtgcgctgatttatgcggggaataacctgaagctgtttacagaccgtctgcataaccagcatggtgatatcctggccggcaacagtctgtgggtacagaaggatgcttccggcggtgcaaacacagagattatcaataattccgggaatattgagacgcatcagggcgatattgttgtaagaaccgggcatcttctgaaccagcgggagggattttctgccacaacaacaacccggactaacccctcatccattcagggaatgggaaatgctctggttgatattcccctttcccttcttcctgacggcagctatggctatttcacccgtgaagttgaaaatcagcacggtacgccctgcaacgggcacggggcatgcaatatcacaatggatacgctttattattacgcgccgtttgctgacagtgccacacagcgctttctcagcagccagaacatcacaacagtaaccggtgctgataatccggcaggccgcattgcgtcagggcgtaatctttctgctgaggctgaacgactggaaaaccgggcgtcatttatcctggcgaatggggatatcgcactctcgggcagagagttaagcaatcagagctggcagacggggacagagaatgaatatctggtataccgctacgacccgaaaacgttttacggtagctatgcaacaggctctctggataaactgcccctgctgtcaccggaatttgaaaacaataccatcagattttcactggatggccgggaaaaagattacacgcccggtaagacgtattattccgttattcaggcgggcggggatgttaagacccgttttaccagcagtatcaataacggaacaaccactgcacatgcaggtagtgtcagtccggtggtctctgcacctgtactgaatacgttaagtcagcagaccggcggagacagtctgacacagacagcgctgcagcagtatgagccggtggtggttggctctccgcaatggcacgatgaactggcaggtgccctgaaaaatattgccggaggttcgccactgaccggtcagaccggtatcagtgatgactggccactgccttccggcaacaatggatacctggttccgtccacggacccggacagtccgtatctgattacggtgaacccgaaactggatggtctcggacaggtggacagccatttgtttgccggactgtatgagcttcttggagcgaagccgggtcaggcgccacgtgaaacggctccgtcgtataccgatgaaaaacagtttctgggctcatcgtattttcttgaccgcctcgggctgaaaccggaaaaagattatcgtttcctgggggatgcggtctttgatacccggtatgtcagtaacgcggtgctgagccggacgggttcacgttatctcaacggactgggttcagacacggaacagatgcggtatctgatggataacgcggccagacaacagaaaggactgggattagagtttggtgtggcgctgacagctgaacagattgctcagcttgacggcagcatactgtggtgggagtcagtcaccatcaacggacaaacagtcatggtcccgaaactgtatctgtcgccggaagatatcaccctgcataacggcagcgttatcagcgggaacaacgtgcaacttgcgggcggcaatatcaccaacagcggcggcagcatcaacgcacagaacgacctctcgctcgacagttccggctatatcgacaacctgaatgcggggctgataagcgcgggcggtagcctggacctgagcgccatcggggatatcagcaatatcagctcagtcatcagcggtaaaaccgtacaactggaaagcgtgagtggcaacatcagcaatatcacccggcgtcagcaatggaatgcgggcagtgacagccaatatggtggtgtgcatctcagcggtacggacaccggtccggttgcgaccattaaaggcactgattcactttcgctggatgcagggaaaaacattgatattaccggggcaacggtctcgtccggtggagaccttggaatgtctgcgggtaatgatatcaacattgccgcaaacctgataagtgggagcaaaagtcagtccggtttctggcacactgatgacaacagttcatcatccaccacctcacagggcagcagcatcagcgccggcggtaacctggcgatggctgcaggccataatctggatgtcacggcatcctctgtttctgccgggcacagcgccctgctttcttgcaggtcacgacctagtcttgaatgcagtcagggaaaagcaaaaacaagtcgcaacggcaggtcagaaagtcatgaaagccacgcagctgtgtccacggtgacagcgggcgataacttcctccttgttgccggtcgtgatattgccagtcaggctgccggtatggctgcggaaaataacgtggtcatccggggcggacgtgatgtgaacctggtggcagagtctgccggcgcaggcgacagctatacgtcgaagaaaaagaaagagattaacgagacagtccgtcagcagggaacggaaatcgccagcggtggtgacaccaccgtcaacgcaggacgggatatcaccgctgttgcgtcatccgttaccgcaaccggcaatatcagcgtgaatgccggtcgtgatgttgccctgaccacggcgacagaaagtgactatcactatctggaaacgaagaaaaaaagcggaggttttctcagtaagaaaaccacccgcaccatcagtgaggacagtgccacccgtgaagcaggctccctgctgtcggggaaccgcgtgaccgttaacgccggtgataacctgacggtagagggttcggatgtggtggctgaccgggatgtgtcactggcggcgggtaaccatgttgatgttcttgctgccaccagtacagatacgtcctggcgctttaaggaaacgaagaaatccggtctgatgggtaccggcggtattggtttcaccattggcagcagtaagacaacgcacgaccggcgcgaggccgggacaacgcagagtcagagtgccagcaccatcggctccactgccggtaatgtcagtattaccgcgggcaaacaggctcatatcagcggttcggatgtgattgcgaaccgggatatcagcattaccggtgacagtgtggtggttgacccggggcatgaccgtcgtactgtggacgaaaaatttgagcagaagaaaagcgggctgacggttgccctttccggcacggtgggcagtgccatcaataatgcggttaccagtgcacaggagacgaaggagagcagtgacagccgtctgaaagccctgcaggccacaaagacagcgctgtctggtgtgcaggccggacaggctgcgacaatggcctccgcaaccggtgacccgaatgcgggagtcagcctgtcgctcaccacccagaaatcgaaatcacaacaacattctgaaagtgacacagtatccggcagtacgctgaatgccgggaataatctgtctgttgtcgcaaccggcaaaaacaggggcgataaccgcggagatattgtgattgcaggaagccagcttaaggccggtggtaacacaagcctggatgccgcgaatgatattctgttgagtggcgccgcaaacacacaaaaaacaacgggcaggaacagcagcagtggcggtggcgtgggtgtcagtatcggtgcaggtaaaggtgccggtatcagcgcctttgccagcgttaatgcggcaaaaggcagggagaaaggtaacggtactactaccgacaaaaccgtcaccatcaacagtggtcgggatacggtactgaacggtgctcaggtcaacggcaacaggattatcgccgatgtgggccacgacctgctgataagcagccagcaggacaccagtaagtacgacagtaaacagaccagcgtggctgccggcggcagttttacctttggctccatgaccggctcaggttacatcgctgcctcccgggataagatgaagagccgctttgactccgttgctgaacaaaccggaatgtttgcccgggtgatggtggcttcgacatcacagtgggtaaacatacccaactggatggtgcggtcattgcctcactgccacaccggagaaaaaccacctggataccggacgctgggtttagtgactttacaacgaagcgggattataaagtcaagtcacaggtggaatcagtctga

SEQ ID NO: 1119 - protein, 2732 aa, Escherichia coli
MHQPPVRFTYRLLSYLVSAIIAGQPLLPAVGAVITPQNGAGMDKAANGVPVVNIATPNGAGISHNRFTDYNVGKEGLILNNATGKLNPTQLGGLIQNNPNLKAGGEAKGIINEVTGGKRSLLQGYTEVAGKAANVMVANPYGITCDGCGFINTPHATLTTGKPVMNADGSLQALEVTEGSITINGAGLDGTRSDAVSIIARATEVNAALHAKDLTVTAGANRVTADGRVRALKGEGDVPKVAVDTGALGGMYARRIHLTSTESGVGVNLGNLYARDGDITLDASGRLTVNNSLATGAVTAKGQGVTLTGDHKAGGNLSVSSRRDIVLSNGTLNSDKDLSLTAGGRITQQNEKLTAGRDVTLAAKNITQDTASQINAARDIVTVASDTLTTQGQITAGQNLTASATTLTQDGILLAKSHAGLNAGTLNNSGAVQGATLTLGSTTLSNSGSLLSGGPLTMNTRDFTQSGRTGAKGKVDIMASGKLTSTGLLVTMHLVLKAQDVTQNGVLSGGKGLTVSATSSGKKSVTHSDAAMTLNVTTVALDGETSAGDTLRVQADKLSTAAGAQLQSGKNLSINARDARLAGTQAAQQTMVVNASEKLTHSGKSSAPSLSLSAPELTSSGVLVGSALNTQSQTLTNSGLLQGEASLTVNTQRLDNQQNGTLYSAADLTLDIPDIRNSGLITGDNGLMLNAVSLSNPGKIIADTLSVRATTLDGDGLLQGAGALALAGDTLSQGSHGRWLTADDLSLRGKTLNTAGTTQGQNITVQADRWANSGSVLATGNLTASATGQLTSTGDIMSQGDTTLKAATTDNRGSLLSAGTLSLDGNSLDNRGTVQGNHVTIRQNSVTNSGTLTGIAALTLAARMASPQPALMNNGGSLLTSGDLTITAGSITSSGHWQGKRVLITADSLANSGAIQAADSLTARLTGELVSTAGSKVTSNGEMALSALNLSNSGQWIAKNLTLKANSLTSAGDITGVDTLTLTVNQTLNNQANGKLLSAGVLTLKADSVTNDGQLQGNVTTITAGQLTNGGHLQGETLTLTASGGVNNRSGGVLMSRNALNVSTATLSNQSTIQGGGGVSLNATDRLQNDGKILSGSNLTLTAQVLANTGSGLVQAATLLLDVVNTVNGGRVLATGSDVKGTTLNNTGTLQGATLVNYHTFSSGTLLGTSGLGVKGSSLLQNGTGRLYSAGNLLLDAQDFSGQGQVVATGDVTLKLIAALTNHGTLAAGKTLSVTSQNAITNGGVMQGDAMVLGAGEAFTNNGLTAGKGNSVFSAQRLFLNAPGSLQGGGDVSLNSRSDITISGFTGTAGSLTMNVAGTLLNSALIYAGNNLKLFTDRLHNQHGDILAGNSLWVQKDASGGANTEIINNSGNIETHQGDIVVRTGHLLNQREGFSATTTTRTNPSSIQGMGNALVDIPLSLLPDGSYGYFTREVENQHGTPCNGHGACNITMDTLYYYAPFADSATQRFLSSQNITTVTGADNPAGRIASGRNLSAEAERLENRASFILANGDIALSGRELSNQSWQTGTENEYLVYRYDPKTFYGSYATGSLDKLPLLSPEFENNTIRFSLDGREKDYTPGKTYYSVIQAGGDVKTRFTSSINNGTTTAHAGSVSPVVSAPVLNTLSQQTGGDSLTQTALQQYEPVVVGSPQWHDELAGALKNIAGGSPLTGQTGISDDWPLPSGNNGYLVPSTDPDSPYLITVNPKLDGLGQVDSHLFAGLYELLGAKPGQAPRETAPSYTDEKQFLGSSYFLDRLGLKPEKDYRFLGDAVFDTRYVSNAVLSRTGSRYLNGLGSDTEQMRYLMDNAARQQKGLGLEFGVALTAEQIAQLDGSILWWESVTINGQTVMVPKLYLSPEDITLHNGSVISGNNVQLAGGNITNSGGSINAQNDLSLDSSGYIDNLNAGLISAGGSLDLSAIGDISNISSVISGKTVQLESVSGNISNITRRQQWNAGSDSQYGGVHLSGTDTGPVATIKGTDSLSLDAGKNIDITGATVSSGGDLGMSAGNDINIAANLISGSKSQSGFWHTDDNSSSSTTSQGSSISAGGNLAMAAGHNLDVTASSVSAGHSALLSCRSRPSLECSQGKAKTSRNGRSESHESHAAVSTVTAGDNFLLVAGRDIASQAAGMAAENNVVIRGGRDVNLVAESAGAGDSYTSKKKKEINETVRQQGTEIASGGDTTVNAGRDITAVASSVTATGNISVNAGRDVALTTATESDYHYLETKKKSGGFLSKKTTRTISEDSATREAGSLLSGNRVTVNAGDNLTVEGSDVVADRDVSLAAGNHVDVLAATSTDTSWRFKETKKSGLMGTGGIGFTIGSSKTTHDRREAGTTQSQSASTIGSTAGNVSITAGKQAHISGSDVIANRDISITGDSVVVDPGHDRRTVDEKFEQKKSGLTVALSGTVGSAINNAVTSAQETKESSDSRLKALQATKTALSGVQAGQAATMASATGDPNAGVSLSLTTQKSKSQQHSESDTVSGSTLNAGNNLSVVATGKNRGDNRGDIVIAGSQLKAGGNTSLDAANDILLSGAANTQKTTGRNSSSGGGVGVSIGAGKGAGISAFASVNAAKGREKGNGTTTDKTVTINSGRDTVLNGAQVNGNRIIADVGHDLLISSQQDTSKYDSKQTSVAAGGSFTFGSMTGSGYIAASRDKMKSRFDSVAEQTGMFARVMVASTSQWVNIPNWMVRSLPHCHTGEKPPGYRTLGLVTLQRSGIIKSSHRWNQS

SEQ ID NO: 1120 - DNA, 1761 bp, Escherichia coli
atgcagcaccggcagaaaaacattctgacgaaaacgtcccttttatcccgtgcgttgtctgtcccctgttgtgatatgttccggcgcggctctccgtggatatgctatctctccctctccgttttttctggttgtttcatccccgcattttcgtctccggcagccatgctgtctccgggtgaccgcagtgcaattcagcagcaacagcagcagttgctggatgaaaaccagcgtcagcgtgatgcgctggagcgcccgctgaccatcacgccgtctccggaaacgtctgccggtactgaaggtccctgctttacggtgtcaagcattgttgtcagtggggccacccgactgacgtctgcagaaaccgacagactggtgccgtgggtgaatcagtgtctgaatatcacggggctgaccgcggtcacggatgccgtgacggacggctatatacgccggggatatatcaccagccgggcctttctgacagagcaggacctttcagggggcgtactgcacataacggtcatggaaggcaggctgcagcaaatccgggcggaaggcgctgaccttcctgcccgcaccctgaagatggttttcccgggaatggaggggaaggttctgaacctgcgggatattgagcaggggatggagcagattaatcgtctgcgtacggagccggtacagattgaaatatcgcccggtgaccgtgagggatggtcggtggtgacactgacggcattgccggaatggcctgtcacagggagcgtgggcatcgacaacagcgggcagaagagtaccggtacggggcagttaaatggtgtcctttcctttaataatcctctggggctggctgacaactggtttgtcagcgggggacggagcagtgacttttcggtgtcacatgatgcgaggaattttgccgccggtgtcagtctgccgtatggctataccctggtggattacacgtattcatggagtgactacctcagcaccattgataaccggggctggcggtggcgttccacgggagacctgcagactcaccggctgggactgtcgcatgtcctgttccgtaacggggacatgaagacagcactgaccggaggtctgcagcaccgcattattcacaattatctggatgatgttctgcttcagggcagcagccgtaaactcacttcattttctgtcgggctgaatcacacccacaagtttctggggggggtcggaacactgaatccggtattcacacgggggatgccctggttcggcgcagaaagcgaccacgggaaaaggggagacctgcccgtaaatcagttccggaaatggtcggtgagtgccagttttcagcgccccgtcacggacagggtgtggtggctgaccagcgcttatgcccagtggtcaccggaccgtcttcatggtgtggaacaactgagcctcgggggtgagagttcagtgcgtggctttaaggatcagtatatctccggtaataacggcggttatctgcggaatgagctgtcctggtctctgttctccctgccatatgtgggaactgtccgtgcagtggctgcactggacggcggctggctgcactctgacagcgatgacccgtactcgtccggcacgctgtggggtgctgctgccgggctcagcaccaccagtggccatgtttccggttcgttcactgccggactgcctctggtttacccggactggcttgcccctgaccatctcacggtttactggcgcgttgccgtcgcgttt

SEQ ID NO: 1121 - protein, 587 aa, Escherichia coli
MQHRQKNILTKTSLLSRALSVPCCDMFRRGSPWICYLSLSVFSGCFIPAFSSPAAMLSPGDRSAIQQQQQQLLDENQRQRDALERPLTITPSPETSAGTEGPCFTVSSIVVSGATRLTSAETDRLVPWVNQCLNITGLTAVTDAVTDGYIRRGYITSRAFLTEQDLSGGVLHITVMEGRLQQIRAEGADLPARTLKMVFPGMEGKVLNLRDIEQGMEQINRLRTEPVQIEISPGDREGWSVVTLTALPEWPVTGSVGIDNSGQKSTGTGQLNGVLSFNNPLGLADNWFVSGGRSSDFSVSHDARNFAAGVSLPYGYTLVDYTYSWSDYLSTIDNRGWRWRSTGDLQTHRLGLSHVLFRNGDMKTALTGGLQHRIIHNYLDDVLLQGSSRKLTSFSVGLNHTHKFLGGVGTLNPVFTRGMPWFGAESDHGKRGDLPVNQFRKWSVSASFQRPVTDRVWWLTSAYAQWSPDRLHGVEQLSLGGESSVRGFKDQYISGNNGGYLRNELSWSLFSLPYVGTVRAVAALDGGWLHSDSDDPYSSGTLWGAAAGLSTTSGHVSGSFTAGLPLVYPDWLAPDHLTVYWRVAVAF

SEQ ID NO: 1122 - DNA, 621 bp, Escherichia coli
atgcatatacgaattgactatctggcggataaaaactgctttacagaactgaatgaatctccacgccttcgccggcagtggcaggatgttctggaggagtgccggcagacagaggccgggccagaagaacggctgcgtattgctctgctgaatgtggattacgtcaccagttttgaactgccttttcgcttgttgcttactcgtacaccacaactgattgccgcgctgcgtgaagaatgggacatcagccagaaaaatgtggtgttcaacgataaacgctttggctgcgtgtacaacctgaaggccagcctttcgggtgggccggatacattccggtatcatctgtctcaccgtattcggcgggtggttgcgaatgaaaacacatcatcgccataccaactgattgcccgggaagtgaaagcgccccgtcaacggctgaagtatgcgctggagacaggattgcaggtgagcgcactggacggcctgttctggttcggcagccagcgcattgcggcagatatcctgaggctgagaaagtacgggatgcggattgcgacggcttctgtggacgtgtatgacaacataaccggaacaactcgtcatatccctgtatattactcc

SEQ ID NO: 1123 - protein, 207 aa, Escherichia coli
MHIRIDYLADKNCFTELNESPRLRRQWQDVLEECRQTEAGPEERLRIALLNVDYVTSFELPFRLLLTRTPQLIAALREEWDISQKNVVFNDKRFGCVYNLKASLSGGPDTFRYHLSHRIRRVVANENTSSPYQLIAREVKAPRQRLKYALETGLQVSALDGLFWFGSQRIAADILRLRKYGMRIATASVDVYDNITGTTRHIPVYYS

SEQ ID NO: 1124 - DNA, 1026 bp, Escherichia coli
atggaaaaaacacgtaagcgccgtggtaccggacgggtgacgctgcaggaggtcgctaactttgcaggtgtcggaaccatgaccgtctcccgcgcgctgagaacaccggaacaggtttctgacaagctgagggaaaagatagaacaggccgtagaagagttgggttatattcccaacagaactgctggcgcccttgcatctggtcacagtcatacagtcgccgtactggttccttccctgacagataaagccagctcccgctttatgcagtcgttgcagcaggtgcttaataaaaatgaattccagctactgcttgggtgtcatgagtataatcagctcaaagaagctgaaattctgatgacgcttcttcaaggcaacccggcggcgttagttatttttggttctcagttggctgataaaactcaccagatactcgagaaaactatacctaccgttaacgttgtcggttcccctttcagtccggctcaaattaccatcgaaacagcattttttgaagcatcacataaactgaccgaacatctgctggagcagggttataagaatatcggatttatcggtgcgcatatggaaaaccgcctgcaacgtcagcaactgaacggctggcataaagcaatgctgagccattaccagaacactgatcttgttatcacaatgccggatgccgcaagtctgcaattggggcgttacgcattaaacgagatattactgcgacaaccagagctggatgctgtgatttgcagccacgaagagattgcgctgggtatcatgtttgagtgtcagcggcgtttgttaaaaatccctggaaatatcgctgtagcttgtcttgacggttcagacagttgcgatcaaacacacccaaccttgacatccatccgtattgactacaaaaaaatggggatagagacgggtaagttactgattggactattgaataataatcatgatgaatcagaagagtcgcgtatcgtgcaattcaactaccagatagaattacgtcagagtaca

SEQ ID NO: 1125 - protein, 342 aa, Escherichia coli
MEKTRKRRGTGRVTLQEVANFAGVGTMTVSRALRTPEQVSDKLREKIEQAVEELGYIPNRTAGALASGHSHTVAVLVPSLTDKASSRFMQSLQQVLNKNEFQLLLGCHEYNQLKEAEILMTLLQGNPAALVIFGSQLADKTHQILEKTIPTVNVVGSPFSPAQITIETAFFEASHKLTEHLLEQGYKNIGFIGAHMENRLQRQQLNGWHKAMLSHYQNTDLVITMPDAASLQLGRYALNEILLRQPELDAVICSHEEIALGIMFECQRRLLKIPGNIAVACLDGSDSCDQTHPTLTSIRIDYKKMGIETGKLLIGLLNNNHDESEESRIVQFNYQIELRQST

SEQ ID NO: 1126 - DNA, 441 bp, Escherichia coli
atgttaaaaaatctattaaatacagaggtcgttcaggtcgtggaacaggtcaaagactggcgggaagccgtggcgatttcatgccgaccgttgattgaaaacggttctatcgaaccgcgttatgttgatgcgatctatcactcgcacgacactatcggtccgtactatgtggttggccctggtattgcgatgcctcatgcgcgcccggaagagggggctaacaagctgtcattagcactgaccctgatcccttcaggtgtgaattttgatgccgatgaaaacgatccagtgaaattactgattgtgctggctgcaaccgacagtaccagccacattgaagcgatttctcaactcgccaagttattcgataacgaaaaagacatacaggctattttgacggccaaaacgacgcaggacattttgtctgttattgcgcgctat

SEQ ID NO: 1127 - protein, 147 aa, Escherichia coli
MLKNLLNTEVVQVVEQVKDWREAVAISCRPLIENGSIEPRYVDAIYHSHDTIGPYYVVGPGIAMPHARPEEGANKLSLALTLIPSGVNFDADENDPVKLLIVLAATDSTSHIEAISQLAKLFDNEKDIQAILTAKTTQDILSVIARY

SEQ ID NO: 1128 - DNA, 285 bp, Escherichia coli
atgaaaattacagtggtttgcggtaacggcttaggcaccagcctgatgatggaaatgagcattaaaagcattttgaaggatttgtccatcagcgctgatgttgatcatgtcgacctgggctccgcgaaagggacgccgagtgatatctatgtcggcaccaaagatattgccgagcagttagtcgcgcagtctgtcgcaggcaaaatcgtcgccctggaaaatatgattgataagaaagccatgagagaacgtttgtccgtggcattaaccgaattaggcgcactg

SEQ ID NO: 1129 - protein, 95 aa, Escherichia coli
MKITVVCGNGLGTSLMMEMSIKSILKDLSISADVDHVDLGSAKGTPSDIYVGTKDIAEQLVAQSVAGKIVALENMIDKKAMRERLSVALTELGAL

SEQ ID NO: 1130 - DNA, 1254 bp, Escherichia coli
atggatttctttcgttttttgatgagcgatgtactttccgaacccgcggtgctggtcggtttaatcgccctgattggcctgattgcacagaaaaaaccggtaaccgaatgcattaaaggtaccgtcaagaccattatggggtttgtgattttaggcgcaggggcgggtttagttgtgtcgtcactgggtgacttcgcaaacattttccagcatgcctttggtattcagggtgtcgtgccgaacaatgaagccattgtttccgtagcgcagaaaagcttcgggaaagaaatggcgatgattatgttctttgcgatggttatcaacattatgattgcccgtttcacaccgtggaaatttatcttcctgaccggtcatcacacgttgtttatgtcgatgatggtagcggtaattctggcaacagcaggcatgaccggcgttacgcttatagccgttggctctttggttgttggcgtggcaatggtctttttcccggctattgcgcatccgtacatgaagaaagtgaccggttctgatgacgttgccatcggccacttctcaacattatcttatgtattggccggtttcatcggcagcaagtttggtaataaagagcactcgactgaagacatgaatgtgccgaaaagtctgctgttcttgcgcgacacgccggttgctatctcttttaccatgagcataattttcctggtgacgtgcctgtttgcgggtgcagatgcggtgaaagagcttagcggtggtaaaaactggttcatgttctctatcatgcaatccattaccttcgcagctggcgtgtacatcattctgcagggtgtgcgcatggtgattgcggagattgtcccggcattcaaaggtatttcagacaagctggttccgaatgccagacctgctctcgattgcccggtcgtcttcccttacgcacctaacgctgtactggttggtttcctgagtagctttgctgcaggtttaatcggtatgttcacgttgtatctgctgaacatgatcgtgattattcctggtgtggtgccgcacttcttcgtaggtgcagctgcaggggtattcggtaatgcaacgggtggacgtcgtggtgcgattttgggtgccttcgctcaaggcttgcttattaccttcctgccagtattcttattgccggtgctgggtgatattggttttgctaacaccaccttcagtgatgctgactttggcgcactgggtattttgttagggattatcgttcgc

SEQ ID NO: 1131 - protein, 418 aa, Escherichia coli
MDFFRFLMSDVLSEPAVLVGLIALIGLIAQKKPVTECIKGTVKTIMGFVILGAGAGLVVSSLGDFANIFQHAFGIQGVVPNNEAIVSVAQKSFGKEMAMIMFFAMVINIMIARFTPWKFIFLTGHHTLFMSMMVAVILATAGMTGVTLIAVGSLVVGVAMVFFPAIAHPYMKKVTGSDDVAIGHFSTLSYVLAGFIGSKFGNKEHSTEDMNVPKSLLFLRDTPVAISFTMSIIFLVTCLFAGADAVKELSGGKNWFMFSIMQSITFAAGVYIILQGVRMVIAEIVPAFKGISDKLVPNARPALDCPVVFPYAPNAVLVGFLSSFAAGLIGMFTLYLLNMIVIIPGVVPHFFVGAAAGVFGNATGGRRGAILGAFAQGLLITFLPVFLLPVLGDIGFANTTFSDADFGALGILLGIIVR

SEQ ID NO: 1132 - DNA, 252 bp, Escherichia coli
atggaacaaaaaacattatcagctgaaccccgcaggtcattttcaaatgagtttaaacttcaaatggttacactggctttacaaccaaggggttctgttgcccgtattgcccgggagcatgatatcaatgataatcttctgttcaaatggctcaggctctcgctgatcaaagggcgtatatcacggcgtcttccgttaacgaactcttctggcattggcgttgaattattacctgtggagatgacgctggga

SEQ ID NO: 1133 - protein, 84 aa, Escherichia coli
MEQKTLSAEPRRSFSNEFKLQMVTLALQPRGSVARIAREHDINDNLLFKWLRLSLIKGRISRRLPLTNSSGIGVELLPVEMTLG

SEQ ID NO: 1134 - DNA, 1011 bp, Escherichia coli
atgagtacgcgtattaatttgtggcgggcgctttttggcgagaaacctcgtatcttgctggaaaatagtgattttactgtcacgtcttttcgctatgacagcggtgtcgaggggcttaaaattgcaaacagtcgtggacatttgattattcttccctggatggggcagatgatttgggatgcgcaatttgatggacacggcctcaccatgtgcaatatgtttcgccagcctaaaccggcgacagaggtgatagagacctatggctgttttgcttttcattcaggtttgctggctaatggctgcccatctgcggaagatactcatctgctacacggtgaaatggcctgtgccgcgatggatgaagcatggctggaattagacggagatatgttacgccttaacgggcgttacgagtatgtaatgggtttcggtcatcattatctggctcaaccaacagtggtccttcacaaatcctctacactgttcgatattaagatggccgtaaccaatctggcttctgtagatatgccactacaatatatgtgccacatgaattatgcatatataccaaatgctacattcagccagaatatcccggacgaaatattaagattgcgtgaatcagtgccttcgcatgttaatcccaccgctcagtggctggcgtttaatcaacggattatgcagggagaagcctctctgtcgacgctgagtcaaccggaattttatgatccagaaattgtcttctttgcagacaaactggacgcttatacagatcagccagagtttcgcatgatctctcccgatggcactacgtttgttactcgtttctacagtgctgaactaaattatgtgacacgctggatcctttataacggagagcaacaggtagccgcctttgcattacctgcaacctgtcggcctgaggggtatcttgccgcgcaacgtaatggcacgctgattcaggttgcaccgcagcaaacgcgcacttttacagtcaccacaggaattgaa

SEQ ID NO: 1135 - protein, 337 aa, Escherichia coli
MSTRINLWRALFGEKPRILLENSDFTVTSFRYDSGVEGLKIANSRGHLIILPWMGQMIWDAQFDGHGLTMCNMFRQPKPATEVIETYGCFAFHSGLLANGCPSAEDTHLLHGEMACAAMDEAWLELDGDMLRLNGRYEYVMGFGHHYLAQPTVVLHKSSTLFDIKMAVTNLASVDMPLQYMCHMNYAYIPNATFSQNIPDEILRLRESVPSHVNPTAQWLAFNQRIMQGEASLSTLSQPEFYDPEIVFFADKLDAYTDQPEFRMISPDGTTFVTRFYSAELNYVTRWILYNGEQQVAAFALPATCRPEGYLAAQRNGTLIQVAPQQTRTFTVTTGIE

SEQ ID NO: 1136 - DNA, 1314 bp, Escherichia coli
atgaacgataaaaacatcattcagatgcctgatgggtatctgaataagactcccttgttccagtttattttgttatcgtgtttattcccgctatggggatgcgcagctgcattaaatgacatattaatcactcaattcaaaagtgtattttcgctaagtaactttgcttcagcattggtgcagagcgcattttatggaggttattttttaattgcaataccagcatcccttgtgattaaaaagaccagttataaggtggcaattttaattggcctgacgctgtatattggtggttgtacactttttttccctgcctcacatatggcaacctacactatgttccttgcagctatttttgcgattgcgattggcctgagtttccttgaaactgcagcgaacacatacagttcaatgatcggtccaaaagcctatgccacattgcggctcaatatcagccagaccttttatccgattggtgctgcgtctggtattttattgggcaaatatctggttttctccgagggggaaagccttgaaaagcagatgtcaggaatgaacgccgggcaaattcacaactttaaggtgctgatgttagagaacacccttgaaccgtataagtatatgattatgattctggttgtggtcatggtgttgttccttttaacccgcttcccaacctgtaaagtggcacagacaagtcaccataaacgcccgtcagcaatggatacgctgcgctatctggctagaaatccgcgctttcgtcgcggtattgtggcgcagttcctttatgtgggtatgcaggtcgcagtatggtcatttaccattcgtctggcgctggagttgggcgatatcaacgaacgtgatgcttcaaacttcatggtctatagctttgcctgcttctttattggcaagtttatagccaacatccttatgacgcgttttaatccggaaaaagtattgattctctattccgttataggggcgctgttcctggcatatgttgcactggctccaagtttcagcgcggtctatgtcgccgtcctggtaagtgttttgtttggcccttgctgggcgacgatctatgcaggaacactggatacagttgataacgaacatacagaaatggcaggagcagtcattgttatggctattgtcggtgccgcggtggttccagcaattcagggatatattgcagatatgttccactcactacagctttcattcctggtttctatgctctgctttgtctatgtcggagtctacttctggcgtgaaagcaaagtacgtaccgcactggctgaagtcacagcgtcc

SEQ ID NO: 1137 - protein, 438 aa, Escherichia coli
MNDKNIIQMPDGYLNKTPLFQFILLSCLFPLWGCAAALNDILITQFKSVFSLSNFASALVQSAFYGGYFLIAIPASLVIKKTSYKVAILIGLTLYIGGCTLFFPASHMATYTMFLAAIFAIAIGLSFLETAANTYSSMIGPKAYATLRLNISQTFYPIGAASGILLGKYLVFSEGESLEKQMSGMNAGQIHNFKVLMLENTLEPYKYMIMILVVVMVLFLLTRFPTCKVAQTSHHKRPSAMDTLRYLARNPRFRRGIVAQFLYVGMQVAVWSFTIRLALELGDINERDASNFMVYSFACFFIGKFIANILMTRFNPEKVLILYSVIGALFLAYVALAPSFSAVYVAVLVSVLFGPCWATIYAGTLDTVDNEHTEMAGAVIVMAIVGAAVVPAIQGYIADMFHSLQLSFLVSMLCFVYVGVYFWRESKVRTALAEVTAS

SEQ ID NO: 1138 - DNA, 918 bp, Escherichia coli
atggacattgcagttattggttccaatatggtggatctcattacttacacgaatcagatgcctaaagaaggagaaactctggaagcacctgccttcaaaatcggatgtggtgggaaaggtgctaatcaagcggtggcggcggctaaattgaattcaaaagtcctgatgctgactaaagtaggtgatgatatttttgcggataatactattcgtaatctcgaatcatggggaattaataccacttatgttgagaaggtcccctgtaccagcagtggtgttgcaccgatctttgttaatgccaactcgagcaatagtatattaataattaagggagcgaataaatttctttccccggaagatatcgatcgagctgcagaagatctgaaaaaatgcaaattgatcgttttacaactggaagttcaactggaaacagtttaccacgcgattgagtttggtaagaaaaatggtattgaagtgttattaaatccggctccggcattgcgtgagttagatatgtcttatgcctgcaaatgtgatttctttatcccgaatgaaacagaactggaaatattaaccggtatgtcggttgatacttatgatcatattcgtttggccgcacgttcgttagttgataaagggctgaacaatattattgttaccatgagcgaaaaaggcgcattatggatgacccgtgatcaggaagtccatgttcctgcattcaaagtaaatgctgttgatactagtggcgctggtgacgcatttattggttgcttttcccattattatgttcaaagcggtgatgttgaagccgctttgaaaaaagccgctctctttgccgctttcagcgtcacagggaaaggtacgcaatcatcttatccgagtattgaacaatttaatgaatttttaaccttaaacgaa

SEQ ID NO: 1139 - protein, 306 aa, Escherichia coli
MDIAVIGSNMVDLITYTNQMPKEGETLEAPAFKIGCGGKGANQAVAAAKLNSKVLMLTKVGDDIFADNTIRNLESWGINTTYVEKVPCTSSGVAPIFVNANSSNSILIIKGANKFLSPEDIDRAAEDLKKCKLIVLQLEVQLETVYHAIEFGKKNGIEVLLNPAPALRELDMSYACKCDFFIPNETELEILTGMSVDTYDHIRLAARSLVDKGLNNIIVTMSEKGALWMTRDQEVHVPAFKVNAVDTSGAGDAFIGCFSHYYVQSGDVEAALKKAALFAAFSVTGKGTQSSYPSIEQFNEFLTLNE

SEQ ID NO: 1140 - DNA, 780 bp, Escherichia coli
atggaaacgaagcaaaaagagcgtatccgacgtttgattgaaatacttaagaaaaccgacagaatccatttgaaagacgcggcacgaatgctggaagtttctgtaatgactattcgtcgcgatctccatcaggaagatgaacctctgccactgaccctactgggtggctatattgtaatggtgcataaacccgcaccatccatgccagtaatccaggacgttccgagaaatcatcgtgatgacttacctattgcaattctggccgccggaatggttaatgaaaatgatctgatcttctttgataatggccaggagataccgctcgttataagcatgatcccggatgcaatcaccttcactggcatctgttactcacatcgtgtctttgttgcgttgaatgaaaaacctaatgtgacagcaatactttgtggtggtacgtatcgtgccagaagtgatgctttttacgatgccagtaactcttcgccattagactctctcaatccgcgaaaaatatttatttccgccagcggtgtacatgatcactttggcgtcagctggtttaatcccgaagatcttgccactaagcgtaaagcgatggcccgtggactaaggaaaattttgctcgcccgccacgccttgttcgatgaagtagcctctgccagcctcgcaccgctctctgcatttgatgttctgattagcgatcgtccgttaccggcagattatgttacgcactgccggaatgcttctgtaaaggtcattacacctgattcagaagacgaa

SEQ ID NO: 1141 - protein, 260 aa, Escherichia coli
METKQKERIRRLIEILKKTDRIHLKDAARMLEVSVMTIRRDLHQEDEPLPLTLLGGYIVMVHKPAPSMPVIQDVPRNHRDDLPIAILAAGMVNENDLIFFDNGQEIPLVISMIPDAITFTGICYSHRVFVALNEKPNVTAILCGGTYRARSDAFYDASNSSPLDSLNPRKIFISASGVHDHFGVSWFNPEDLATKRKAMARGLRKILLARHALFDEVASASLAPLSAFDVLISDRPLPADYVTHCRNASVKVITPDSEDE

SEQ ID NO: 1142 - DNA, 468 bp, Escherichia coli
atgagttgctatatgaaaatatactggacaagaaaaagcattcctgaactttcagcacttccaccttcattaagaaagaaaaattttactgacacatataatgctgcatcttctcatatcgaatactggataggtgctggcgtctcatttatctcgatgatgattttattcagagtatatgactttcttttacccgcccaagatactttcccgggtgatatcatcagaagtttatgtgttgtgtgtccatccatattaatctggtttcagttttcggtatatgtcatgaggaaatattacaggcatattctggtgcgaggaaaggaaaccgaaaccatttcagaaaggttgatacgtgaggctgatacacgagaatatgaactatggcgtccggtccgtcgctttttctccattctttttctcattgttctattagtttgcattcattcactgataacaactataaaa

SEQ ID NO: 1143 - protein, 156 aa, Escherichia coli
MSCYMKIYWTRKSIPELSALPPSLRKKNFTDTYNAASSHIEYWIGAGVSFISMMILFRVYDFLLPAQDTFPGDIIRSLCVVCPSILIWFQFSVYVMRKYYRHILVRGKETETISERLIREADTREYELWRPVRRFFSILFLIVLLVCIHSLITTIK

SEQ ID NO: 1144 - DNA, 426 bp, Escherichia coli
atgttttttacactcctctctttaataattattcaattatttgtcccttatcttctgggagtaaggaaaacggaagagtggatagtttcgcaaatgtctttttctggggcaattttatggattaaaatattttcttctgtatttcttgttcctgtatatgaagagattgtatttcgagggtgtctttttaactcttttaaactctggttccatgataatatttatatccctgcaattgtaacatcagttataatctctgcattgcatctacaatatacatactttcgtacatttttgatgttatttctggtatcgttagttcttattagtgcaaaaataaagtcgaatggcctattaatgcctatattacttcacatcgcgatgaatgtagccatagcaggaatacaatatctggcttatatcaat

SEQ ID NO: 1145 - protein, 142 aa, Escherichia coli
MFFTLLSLIIIQLFVPYLLGVRKTEEWIVSQMSFSGAILWIKIFSSVFLVPVYEEIVFRGCLFNSFKLWFHDNIYIPAIVTSVIISALHLQYTYFRTFLMLFLVSLVLISAKIKSNGLLMPILLHIAMNVAIAGIQYLAYIN

SEQ ID NO: 1146 - DNA, 963 bp, Escherichia coli
atgatgttgaagaaaacgatatttatattaacgttattctctggcaacgtaattgctgcaactgtagaattaggttttgaaaatgagcaatataattatgcttatcgttctgcagatgtcttcatgccgtatattaagagtaatttcaaccctgttactgattctgctttgaatgtgtcactcacctatatgtatcaggatcaatatgggaaaaaacataaaaaaacatctgaggacagatttaaaaccaatcgcgatcgcatagagctctatcttaaaggttatactttaaataggggagcatattctttttctccttccgcaggtttccgttatgagtcatgggatgtaaactacgataatccgaaaaagcaggataagtggaaactggaactacgcttttatcctaatatgacttataaactcaatgaccagttaagcctatatatgaatggttttgttgcccctgtattttttaaaacacaacaagagtcgagaaaagataacaattatgtaaagggtaagttaggggcgaaacgttataacaacgattattatcaggaactccagattctgggtgtcagatataaatttaataatgataatacgctctgggcatcagtctataatgaaagaaaatataatcaacattcctcaaaatatgatcgctggcaattgcgtggaggctatgattttaaagttacagaggagtttgttttgagtccattcataagatatgacctctcttatagagaaaaaaacctcgaaagcacaagtaataatggtttatcaaaaaataataaagaaattcgaactggagccagcttttcctataaaattatcccttctgtaaaactggtaggagaaatatacaggcaaacaaccaacattgaaaactattatggagagcattctgaagacaaaaaccgcatgttctacaaacttggtataaacaaaacattt

SEQ ID NO: 1147 - protein, 321 aa, Escherichia coli
MMLKKTIFILTLFSGNVIAATVELGFENEQYNYAYRSADVFMPYIKSNFNPVTDSALNVSLTYMYQDQYGKKHKKTSEDRFKTNRDRIELYLKGYTLNRGAYSFSPSAGFRYESWDVNYDNPKKQDKWKLELRFYPNMTYKLNDQLSLYMNGFVAPVFFKTQQESRKDNNYVKGKLGAKRYNNDYYQELQILGVRYKFNNDNTLWASVYNERKYNQHSSKYDRWQLRGGYDFKVTEEFVLSPFIRYDLSYREKNLESTSNNGLSKNNKEIRTGASFSYKIIPSVKLVGEIYRQTTNIENYYGEHSEDKNRMFYKLGINKTF

SEQ ID NO: 1148 - DNA, 2220 bp, Escherichia coli
atgaataagcacacactattactgactgttctttttctgaatttgatttgtactcccgtttttgctcaaaactggcaggtggcgacgtttggtcagtctacggatctcaacttttcatcgctgatagattcggccaagatcggacggaataatgcctggcttgcaggaaacaataattttcttgaagctggaaaattttacactttaccaacagatttttttattgaaagccgtgggggaaaaattgctaactcccatgacggtatgaccgtcttttatactattgttccggttactcagacattccgactggaggctgatttgacattagaacagattggtccggaggtgaatggaaaatcaccagcgggacaggagggagctggattgtttgtcagagatattatcggtcctcagcgacaggaacctcagtcagctggaacagaagaatatccccaggcctctaatatattgatgaatgcctttattacacagaataaaaagaatgataacttagtacagattacttcaattgttcgtgaaggagtaataaaaacatggggtaatgaaggtattacaattaagaaacagccgatcattgagaatataaactttacgcaaaaaagaaatattcatatgacgatcgagcgactaccagagaagttcatcctgaccgcttttgataccgatcgtaaagaaaatcagtcatggcaattttctgattactcaggctttatgaatcaactggataataatagtttagctattggtttttttgccgcacgaaatgcgaaactaagggtgaaaaatgcatcatttaaaccgggcaagccactggttgattacaaacaattaacttcacgtcaattcagtcgtgtccggcataaagcccctgaactttttcttgcttcacctcaatccgttgtaagaaactcaacaactcttcaatttttggccaatcaggctggaatagtcagtattgataatgataagcagactaagcaggtgcaggcgggtgaactggtacagtttccagttactttgcaaaaaaaacataatgacttcaccgtcaactttaacgttgatgggaatatatcaaaaaaagctatacgcatagagcaggttaaatcaaacctgactgatccttatgagatttacgtatgtagtgattgtcgacagggggccagaggcagcaaaaatgaccctgtagatttacagacagccgtaaaatttgtcgcacccggcggtaatatataccttaacgatggtcaatatcatggaattaccttagatcgggaattaagtggaatacctggcaagtataaaacaatttctgccattaatccacataaagccatttttataaacaagacattcaatctggatgcaagttactggcatctaaaatccgtggtctttgacggcaatgtggataatggaaataataaaccagcatatttgcgtatagctggtagctataatattattgagcatgtgatagccagaaataatgatgatacgggaatttctatttcagcgaaagataaaaaccgttttttctggccagctcataacttagttttaaactcagattcatataataatcttgatttatccgggattaatgccgatggttttgctgcaaaattaggtgtcggaccgggaaacatttttcgaggatgcattgcacataataatgcagatgatggttgggacctatttaacaaaattgaagatggtccaaatgcatctgttactattgagaattctgtagcctatgaaaatggcctgccatacaataaagcggatatcctaaaagggagtattggcaatggcggtgaaggtcaacccagtaaatcacaagttattaattccattgctattaataataatatggatggattcactgataattttaatactgggtcattgatagttagaaataatatagcaatgaacaatgcacgctataattatattttaagaactaacccatataaattcccatcatctatcctttttgataataattattcaatcagagatgattgggaaaataaaataaaagacttcttaggtgatacagttaacagtgtgaattataaattgcttgtttcacatgaaacaggaccggtacaaaaagatttatttttcacacgagatgatagtggaaatattatctatcctgatttttttcttaatatcattaataaatttaat

SEQ ID NO: 1149 - protein, 744 aa, Escherichia coli
MNKHTLLLTVLFLNLICTPVFAQNWQVATFGQSTDLNFSSLIDSAKIGRNNAWLAGNNNFLEAGKFYTLPTDFFIESRGGKIANSHDGMTVFYTIVPVTQTFRLEADLTLEQIGPEVNGKSPAGQEGAGLFVRDIIGPQRQEPQSAGTEEYPQASNILMNAFITQNKKNDNLVQITSIVREGVIKTWGNEGITIKKQPIIENINFTQKRNIHMTIERLPEKFILTAFDTDRKENQSWQFSDYSGFMNQLDNNSLAIGFFAARNAKLRVKNASFKPGKPLVDYKQLTSRQFSRVRHKAPELFLASPQSVVRNSTTLQFLANQAGIVSIDNDKQTKQVQAGELVQFPVTLQKKHNDFTVNFNVDGNISKKAIRIEQVKSNLTDPYEIYVCSDCRQGARGSKNDPVDLQTAVKFVAPGGNIYLNDGQYHGITLDRELSGIPGKYKTISAINPHKAIFINKTFNLDASYWHLKSVVFDGNVDNGNNKPAYLRIAGSYNIIEHVIARNNDDTGISISAKDKNRFFWPAHNLVLNSDSYNNLDLSGINADGFAAKLGVGPGNIFRGCIAHNNADDGWDLFNKIEDGPNASVTIENSVAYENGLPYNKADILKGSIGNGGEGQPSKSQVINSIAINNNMDGFTDNFNTGSLIVRNNIAMNNARYNYILRTNPYKFPSSILFDNNYSIRDDWENKIKDFLGDTVNSVNYKLLVSHETGPVQKDLFFTRDDSGNIIYPDFFLNIINKFNZTMP

SEQ ID NO: 1150 - DNA, 1512 bp, Escherichia coli
atgactgaagaaaacagaagaataaaagccataactcgtttttcatatggtagtggaaatcttatcggcagtggagctctggctattagtggagcatggttactttatttctacactacattttgtggattgacagtttttcaggccactgtaatattttccattgctacttatctggatgtcatcctgaatccactaatggggtttattacggataatttttatcagacaaaactcggtcgtcgctttggtcgtcgtcgcttcttcatattaattgccattccatgtatgattatctatccattgctttgggtaaatggtatgagtttttggtattatctttctacttatatcatttttgaagtggtatatactatgattatgataccgtataataccttacctgttgaaatgacaaaggatttcaatcaaaggacctatttgacaggttctaaagctatgtttggtaaagtagctaatttcttagcagccgctattcctggtatctatttttacttcttcaataaagattcagccaccccatttttcctgaccggtttaacttatgctattattatgatcacttcattaataatgctctatttcaacagttgggaacgtccaactgatgatgtagttgatgaatcaacgcatggttttatggagggctttaataaactttttaccgatcttttctcaacctttaagctaaaaaccttcagaacccatcttggtatgtatctatttggtttcggcgctgaatggctatttacagcgacatttacctatttcattgttttcaaccttgaacaaccgagaacatttgtttctgagatgaactcattaagcagtatttgtcagttcttctctacagcattctttatgatgtggtgtgccaaacgaggatttaaacgcccatttatcattgctatcttaattgttgtatcttcagtgattggttatgttggtgtgtactatcttaatattccccatctgacctggctcattattggcatcactatctggtttggtctggggacggggggggtatattacattccgtggagtgtatatgtattccttgccgatgttgatgaggtcttaactggtcgtcgtcgtgaaggtctttatgctggtgcaatggttatggccggtaagttaatgagagccactgtagtattttgtctgggggttgtcctcagtctgtttggttttgagtcaggcattcatcatcaatcagccagtgcagtaaatgcaattaatggcgtcatgatatttggtgtggctggtatggcgttaataggtatctatttctctgtaaaaatgaaattagataaagcatctcacgccgaaataactaaagaattagagcgtctgaaaaaaggtggcagaaaagaagatgctacaccggaaattcgtaagcttgttaagcaactgactggttatgaatatgaccagtgcttcggtaataacaatgttggctttaaatttgaaaacaaagcaggggcattc

SEQ ID NO: 1151 - protein, 504 aa, Escherichia coli
MTEENRRIKAITRFSYGSGNLIGSGALAISGAWLLYFYTTFCGLTVFQATVIFSIATYLDVILNPLMGFITDNFYQTKLGRRFGRRRFFILIAIPCMIIYPLLWVNGMSFWYYLSTYIIFEVVYTMIMIPYNTLPVEMTKDFNQRTYLTGSKAMFGKVANFLAAAIPGIYFYFFNKDSATPFFLTGLTYAIIMITSLIMLYFNSWERPTDDVVDESTHGFMEGFNKLFTDLFSTFKLKTFRTHLGMYLFGFGAEWLFTATFTYFIVFNLEQPRTFVSEMNSLSSICQFFSTAFFMMWCAKRGFKRPFIIAILIVVSSVIGYVGVYYLNIPHLTWLIIGITIWFGLGTGGVYYIPWSVYVFLADVDEVLTGRRREGLYAGAMVMAGKLMRATVVFCLGVVLSLFGFESGIHHQSASAVNAINGVMIFGVAGMALIGIYFSVKMKLDKASHAEITKELERLKKGGRKEDATPEIRKLVKQLTGYEYDQCFGNNNVGFKFENKAGAF

SEQ ID NO: 1152 - DNA, 321 bp, Escherichia coli
atgtttgtatttaatgaagatacagcaatagaagatttaggcaacggggtcaaaagaaaagttttggctcatggtggcaatatgatggcagtagaggtccatttctctaagggggctatcggctctttacatcaccaccaacatgaacagttgacgtatgtcttatcaggtatttttgaatttaccatcggcgatgaagtgcgtacagtaaaaactggtgatactttatataagcagcccaacattgtgcacgggtgcaaatgtctagaaaaaggagttttgcttgatatatttacacctcaacgtcaggattttttaaag

SEQ ID NO: 1153 - protein, 107 aa, Escherichia coli
MFVFNEDTAIEDLGNGVKRKVLAHGGNMMAVEVHFSKGAIGSLHHHQHEQLTYVLSGIFEFTIGDEVRTVKTGDTLYKQPNIVHGCKCLEKGVLLDIFTPQRQDFLK

SEQ ID NO: 1154 - DNA, 798 bp, Escherichia coli
atggatttcatcaatatgttctctcttaaaggtaaaaatgctttagtcactggagcatcatatggtattggttttgagatcgctaaagcactaagtaacgctggtgcaacgatcatttttaatgatgtaatagaagaaaacattaaaaaaggcctggcagcatataaagagaacaacatcaacgcacatggttatttatttgatattacagatgaacagtctgtgaaggaaaatatcaaaaaaatagagagtgacgtaggcattattgatattctggtaaataatgcagggattattcagcgtaaacctatgctagaaactacagcagctgattatcgcaaaataatagatattgatctgacaggtcagtttattatggctaaggcggtattgccttcaatgattaaaaaaggacatggcaagatcattaatatctgttccatgatgagcgaattgggtcgcgaaaccgttgtaggctacgcttcggcaaaaggcggcttaaaaatgctgactaaaaatatctgttctgagtttggtgaaaaaaatattcagtgtaatggtattggtccaggctacattgctacacctcaaacagcaccgttacgtgaaattcaaccagatggcagccgccatccatttgatcagtttattatatcaaaaacgccagctggacgctggggtaaaccagatgatcttgctggtgcagctatatttttagcatcggatgcttcaaactttatcaatggtcatattttatatgtcgatggtggcattctggcctacattggcaaacagcct

SEQ ID NO: 1155 - protein, 266 aa, Escherichia coli
MDFINMFSLKGKNALVTGASYGIGFEIAKALSNAGATIIFNDVIEENIKKGLAAYKENNINAHGYLFDITDEQSVKENIKKIESDVGIIDILVNNAGIIQRKPMLETTAADYRKIIDIDLTGQFIMAKAVLPSMIKKGHGKIINICSMMSELGRETVVGYASAKGGLKMLTKNICSEFGEKNIQCNGIGPGYIATPQTAPLREIQPDGSRHPFDQFIISKTPAGRWGKPDDLAGAAIFLASDASNFINGHILYVDGGILAYIGKQP

SEQ ID NO: 1156 - DNA, 1167 bp, Escherichia coli
atggctaagggtgatattaaaaagttgaagtttgaatctttctacgatagtgaatcgaataacgaagttattcgattaacgccaacagatattctttgccatcgcaattatttttatcaaaaatgttttacaaatgatggtaaaaaattgattttcgctgctgagtttgattgtaaccggaattattatcttatggatttggtaactcagacagcgaaacaactcactgaaggagctggagataacacctttggtggcttcctgtcccctgatgataattatcttttttatgtgaagaatgaaaaacatttgcagcgtgttgatttgaccacattagaagaagttaccatatacacagtaccggataattgggtggggtacggaacatgggttgctaatactgattgtacggaaatcgtcggaatcgaaatcagtaaaactgactggaccccgcttagcgactggaaaatatttctggaattttatcataagaatccacgatgccgtttaattacgattgatctggaaaccggaaacgctgaagtgatattggatcgtaatacttggttagggcatccaatttttcgtccgaataataacgatactatcgccttttgccacgaagggccccatgacctggtggatgcaagaatgtggatgattaaccgtgatgggacaaatgagcgtaaagtgcatgagcaccaacttggtgaaagttgtacacacgagttctggatccctgatggatctgcactggcttatgtttcctatatgaaaggacagcaacagcgttatattcgcaaatataatcctgatactgatgaagattcattagtgatggaaatgccggcatgttcccatttaatgagtaaccataatggtattctctatgttggtgatggttcaggtagtccggttgatgttaaagatacctgcagttataaaattgaaaatgatccctggatttacattcttagcagtaaaaataaaaaaatacataaattggtgaaacataatagttcctggagggtacagaaaggagaccggcaggtaacgcacccgcatccatcattttctccagataataagtacgttttatattcttgcgatgccgaaggtgaaccactatatatggctaaaattcctgaggaaatcttaacccagcaa

SEQ ID NO: 1157 - protein, 390 aa, Escherichia coli
  MISC_FEATURE (376)..(376): unknown
MAKGDIKKLKFESFYDSESNNEVIRLTPTDILCHRNYFYQKCFTNDGKKLIFAAEFDCNRNYYLMDLVTQTAKQLTEGAGDNTFGGFLSPDDNYLFYVKNEKHLQRVDLTTLEEVTIYTVPDNWVGYGTWVANTDCTEIVGIEISKTDWTPLSDWKIFLEFYHKNPRCRLITIDLETGNAEVILDRNTWLGHPIFRPNNNDTIAFCHEGPHDLVDARMWMINRDGTNERKVHEHQLGESCTHEFWIPDGSALAYVSYMKGQQQRYIRKYNPDTDEDSLVMEMPACSHLMSNHNGILYVGDGSGSPVDVKDTCSYKIENDPWIYILSSKNKKIHKLVKHNSSWRVQKGDRQVTHPHPSFSPDNKYVLYSCDAEGEPXLYMAKIPEEILTQQ

SEQ ID NO: 1158 - DNA, 636 bp, Escherichia coli
atgaaaatcgcattgatgaatgaatttagccaggcatctaaaaacgcaataatttttaatgagttagttgcagcaagcgcacatcaaggccatactattttcaatgtaggaatgtgtgatgacaatgatcatcgtctgacttacgttcatctcggcattatttcggctatcttgttaaacagcagatctgttgatttcgttattactggctgtggtacaggacagggggcattgatggcactgaacacattcccgggagttacttgtggttattgcatcgaaccaacagatgcctacctgtttgcacaggtaaataatgggaatgcactgtccttgccatttgcaaagggttttggctggggggcagaattaaacatgcgctatatttttgaaaaagcatttgatggcgaaaagggattaggctatccggcagaacgtcgtgaatcacaaaatgcgaatgccattatactgagtaatatgaaagaagcagttagtaagccactcatggatgctctccaggccatcgatccggagttacttaaacaagctcttggtggcgaaaaattccagaaatgcttctttaataatagtaaagataaagaattggttaattacgttaaaaatttattagataga

SEQ ID NO: 1159 - protein, 212 aa, Escherichia coli
MKIALMNEFSQASKNAIIFNELVAASAHQGHTIFNVGMCDDNDHRLTYVHLGIISAILLNSRSVDFVITGCGTGQGALMALNTFPGVTCGYCIEPTDAYLFAQVNNGNALSLPFAKGFGWGAELNMRYIFEKAFDGEKGLGYPAERRESQNANAIILSNMKEAVSKPLMDALQAIDPELLKQALGGEKFQKCFFNNSKDKELVNYVKNLLDR

SEQ ID NO: 1160 - DNA, 201 bp, Escherichia coli
ctgaccgtgttgactacaacaagccacgacagcgtatttctgcgtgccgataattccctgatcgacatgaactatatcaccagtttcaccggtatgactgacaaatggttttacaagttgatcagtgaaggccatttccctaaacccatcaaactggggcgcagcagccgctggtacaaaagagaagtggagcagtggaag

SEQ ID NO: 1161 - protein, 67 aa, Escherichia coli
LTVLTTTSHDSVFLRADNSLIDMNYITSFTGMTDKWFYKLISEGHFPKPIKLGRSSRWYKREVEQWK

SEQ ID NO: 1162 - DNA, 264 bp, Escherichia coli
atggtcagagaggcatatttcgacgcccctaatctggggcgtttgattcaggatgtctggaataatccgggctttgtgtcaccgggcgcatcaaagcagtaccacccgggatgtggcgctggatcgtcatttaccggactgcgaagacatactaaagaggtgatatgggcgttcagtgattttgtccgcgatcatcgaggtgtgtatgatccggaagcccgttacctcgccggtaatccctggtatcccgtaacaggccagttc

SEQ ID NO: 1163 - protein, 88 aa, Escherichia coli
MVREAYFDAPNLGRLIQDVWNNPGFVSPGASKQYHPGCGAGSSFTGLRRHTKEVIWAFSDFVRDHRGVYDPEARYLAGNPWYPVTGQF

SEQ ID NO: 1164 - DNA, 564 bp, Escherichia coli
atgtatacagaatcaaatgttaagctttcctgtaacgccctctggcaaaagtgtgtccttgcaactctgtatcgggctgcagccacacatcctgaaattaaattattacaatttaaattaataccagggcagggtattaataaggccattccctctctgatggctgattttactggtgaactgcatagactcatttctgaatatttgcagtgtaagcgacgtaaagatcaatctgttgagcccacccctttatattatctctggagtagggaagctgtggctaacgataccactccttatcttatggtgctgctacttaataacgatgtctggtgtaagagtcgtgaggtggtggttctcagaaatctgattgagcaggcgtggggaaaagtattgggtgaagataactccattacacatctggttgtgtatcctgaagtgctgtcgttggtatttgatgcagctaacacatacaacgctgagcctggtgtactggaacagacggcccgggcttacattgaatcacatgctaccattgaacgtcatcttgggtgtagtgacttt

SEQ ID NO: 1165 - protein, 188 aa, Escherichia coli
MYTESNVKLSCNALWQKCVLATLYRAAATHPEIKLLQFKLIPGQGINKAIPSLMADFTGELHRLISEYLQCKRRKDQSVEPTPLYYLWSREAVANDTTPYLMVLLLNNDVWCKSREVVVLRNLIEQAWGKVLGEDNSITHLVVYPEVLSLVFDAANTYNAEPGVLEQTARAYIESHATIERHLGCSDF

SEQ ID NO: 1166 - protein, 81 aa, Escherichia coli
MGRNSVRPVVRGFIAERYVRSLFTATSQTCFRTAEVRVLNPKCPTCSGRSEVSEPAFYLVFRTHPVRDTKARHRISAVLLT

SEQ ID NO: 1167 - DNA, 243 bp, Escherichia coli
atgggaagaaattctgtgaggcctgtggtacggggatttattgcagagcggtatgtacgaagtctgtttacagctaccagccagacttgtttcaggactgcggaggtgcgagtacttaatccgaaatgcccgacctgctcagggcgttcagaggtatcggaacctgcattttatctggtgtttcgcacccaccccgttcgtgacacaaaggcgcgacaccggatatccgcagtcctgcttacc

SEQ ID NO: 1168 - DNA, 285 bp, Escherichia coli
atgaacggtataaaaacggggctggggatcacgccgggtgaacacataatcagtgctgattctgcactcagcagaaatatccggcagtgtttctgcctttcctgtcatggccggttgattttgcagacagatgctcagggggcatggtttgagcatgatttatatgccctgagcgagcaacagaaggcagcctgcgtggtgctgaatccggaaaagtcccacccttacattgaggatatggagatgttttatcgccattaccggtcgtgctggagtggcattgta

SEQ ID NO: 1169 - protein, 95 aa, Escherichia coli
MNGIKTGLGITPGEHIISADSALSRNIRQCFCLSCHGRLILQTDAQGAWFEHDLYALSEQQKAACVVLNPEKSHPYIEDMEMFYRHYRSCWSGIV

SEQ ID NO: 1170 - DNA, 387 bp, Escherichia coli
atgacgatgtacgcaaaatcctttattgcatttgatggcaatgggcgtctgacgggtgcccgtaccgcacagactgcaccttacgatcgctacacttgccacctttgcggcagtgcgctcagataccacccgcaatacgacactgagcgtccctggtttgaacacactgacgacgggctgacggagcacggtcagcagtgcccttatgtcagaccggaacgcagggagatacaactgattaagcgtctgcagcaattcgtaccggatgccttacccgtggtgcgtaaagccagccggcactgcagacaatgtcatcacgattattatggggagcggtactgcacgcactgccataccgggcacttcagtgaggagggggtggcagaa

SEQ ID NO: 1171 - protein, 129 aa, Escherichia coli
MTMYAKSFIAFDGNGRLTGARTAQTAPYDRYTCHLCGSALRYHPQYDTERPWFEHTDDGLTEHGQQCPYVRPERREIQLIKRLQQFVPDALPVVRKASRHCRQCHHDYYGERYCTHCHTGHFSEEGVAE

SEQ ID NO: 1172 - DNA, 597 bp, Escherichia coli
atgaagacttacaacaccaatcccggttacgaaatggatccccagctcctgacacactttaaccagcatctggattcattattcggggtatattcgaaactgttaccgttcagaatggattttgcttaccgaaaaaacaccctcagctacaggtgtgcctgcaggtacgccatgtgtgcggagatactgcgactgattaacgaagtgggagagaaactggtcgggtatgcctgggtaatggaatatacggaacgtaaagggcttcacattcattttgtgggctatctgaacggtcagagccacaggagttcgtatctggtatccagattgatgggagatatctggaggcgggttaccgggggggatggttactaccactggtgccggtttaataaaaattatccggtaaacattaaccacgtcattcactattcagatcacaaagcggtgaatgccttacgctatgccctcagctacctggccaaacgagaacagaaagaatgtggcatcatcctgaaatgcagcgggcttcctgaaaaaagtaaccggggtcgaccgcgactgggcagcaccctgccggagacttattctctggtg

SEQ ID NO: 1173 - protein, 199 aa, Escherichia coli
MKTYNTNPGYEMDPQLLTHFNQHLDSLFGVYSKLLPFRMDFAYRKNTLSYRCACRYAMCAEILRLINEVGEKLVGYAWVMEYTERKGLHIHFVGYLNGQSHRSSYLVSRLMGDIWRRVTGGDGYYHWCRFNKNYPVNINHVIHYSDHKAVNALRYALSYLAKREQKECGIILKCSGLPEKSNRGRPRLGSTLPETYSLV

SEQ ID NO: 1174 - DNA, 789 bp, Escherichia coli
atgacaacacgtataactttcaatatgaccagtgatgagacgctgcgaattgtggatgagtactgtcatacccacaaactttcgcgctctaaggtaatcgacgcattactcagcgccacagcacctgtccttaacgatattaactgttattatcaacttgcaggcaaactgcagtcacgcttattaaatggagtgtatcaacgggatcttcctcacaaacgcaatgtcgtcagtgcagagaagtattgtctggagatctgggaaaacaaacttttcaccaaaagaatcctggagtttgacagttcaaatggtgttctgtacgcgctgaaacataaaagacactatcgccgggataagatgattggacgggttgaaagccggcgtatcaaagacatttgcgaataccagatgcaactgtccggggagaaggcaaaatatgcctgttttatttatattgaaagaacaatatacaatcacgataatccatccggtgggacacctgtaaaagcggctgttggtaatgcagtcatcctgctggcaaaagacgtgatatatgacgagtacttttttgatctgcggcagtcatttttcgtgagcgttaaagatctgatggcctctggcgcaaaaggtattccggagacacagaaatatccggacgtttattgctggatcccgcttttctccataaattccggcgtggtcattaccccggtctataaaattgatccccggaaacccgtaacggtaaaaaaaccggatcagatcactgttgtttgtaattacagagaa

SEQ ID NO: 1175 - protein, 263 aa, Escherichia coli
MTTRITFNMTSDETLRIVDEYCHTHKLSRSKVIDALLSATAPVLNDINCYYQLAGKLQSRLLNGVYQRDLPHKRNVVSAEKYCLEIWENKLFTKRILEFDSSNGVLYALKHKRHYRRDKMIGRVESRRIKDICEYQMQLSGEKAKYACFIYIERTIYNHDNPSGGTPVKAAVGNAVILLAKDVIYDEYFFDLRQSFFVSVKDLMASGAKGIPETQKYPDVYCWIPLFSINSGVVITPVYKIDPRKPVTVKKPDQITVVCNYRE

SEQ ID NO: 1176 - DNA, 204 bp, Escherichia coli
atgaccaccccagtttcgctgatggatgaccagatggtcgatatgacgtttatcactcagctgaccggcctgaccgataagtggttttacaagctcatcaaggatggggcctttccggcacccatcaaactcggccgcagctcccgctggctgaaaagtgaagtggaagcctggctgcaggcgcgtattgcacagtcccgtccg

SEQ ID NO: 1177 - protein, 68 aa, Escherichia coli
MTTPVSLMDDQMVDMTFITQLTGLTDKWFYKLIKDGAFPAPIKLGRSSRWLKSEVEAWLQARIAQSRP

SEQ ID NO: 1178 - DNA, 600 bp, Escherichia coli
atgaaaccacagtatcagacccgttacgagctgctccacgaaagctaccagaaatggctgaccggcttcacccggcacgccgtatcctggggccgtgtgtcatccgaatatccactacttccagaatctgacgcccgggtggtgtcattcaatggtgaaaaaccgaagattgccatcgtaccccggagtctgcaccggctgatttatggctctgacaaacgggccacgccgcccctggatgatgatctggtggtgaacttatgcaccagcgaacatctgctggttcatcatccgatgctggaagggattctgctgtctgaatgtgaacgtctgaggcagcgttctctggcaaataaactgatcagcctcttccgtcagtttggtggcacggagttgcgcctcaaactggtctggctttgctggcttgatttaatgaccggaaacagccttgacgactggacggagaacctgaaacggaaatcagaaaaagagctgggggaatggatcatcgaccgtcagaagcagaacgcagcactgacggatctgatggatcagtacgtgctcctggcataccgcacaacggttgacggtaaccgtaac

SEQ ID NO: 1179 - protein, 200 aa, Escherichia coli
MKPQYQTRYELLHESYQKWLTGFTRHAVSWGRVSSEYPLLPESDARVVSFNGEKPKIAIVPRSLHRLIYGSDKRATPPLDDDLVVNLCTSEHLLVHHPMLEGILLSECERLRQRSLANKLISLFRQFGGTELRLKLVWLCWLDLMTGNSLDDWTENLKRKSEKELGEWIIDRQKQNAALTDLMDQYVLLAYRTTVDGNRN

SEQ ID NO: 1180 - DNA, 255 bp, Escherichia coli
gtgtatgctgcagaattggtaaccggggccctgcagtctttaactccgagtcttgtgctgctcatttgccacaaaatcctggtacgccagctcaatcatttcattcaacagtttttttggggggcaccacgacttcgggcaatactttcaggctgtttgtggatttttccggacagtttcagcggaacggaaccatcagcacgttcatcacgccttttttgttgctcccgggcacttttcagttcatccacaata

SEQ ID NO: 1181 - protein, 85 aa, Escherichia coli
VYAAELVTGALQSLTPSLVLLICHKILVRQLNHFIQQFFWGAPRLRAILSGCLWIFPDSFSGTEPSARSSRLFCCSRALFSSSTI

SEQ ID NO: 1182 - DNA, 219 bp, Escherichia coli
atgtctgttaagtggtgccgtgggtggagactgcttacttttccacagcaactgcagtcattcaggatgctcaggagagaatatgtcaacgccacgagccgggccattttcatgccagccagtatattttctacactgatgcagtctgattttcaccattccatcctcactgattgtcgtgttgttttgggtcatcaccacagctttccgtttctcttt

SEQ ID NO: 1183 - protein, 73 aa, Escherichia coli
MSVKWCRGWRLLTFPQQLQSFRMLRREYVNATSRAIFMPASIFSTLMQSDFHHSILTDCRVVLGHHHSFPFLF

SEQ ID NO: 1184 - DNA, 300 bp, Escherichia coli
ttgtccggcaaccaccatatcaacttcttcccggcgtgccggcgctggtatccaggccgggtttcgaagcgaagcgttcctgacggactcattgacatccgggccggatgtagtcatgcagcatggaacgtccgcccgtatacactgacggcgtccggccgtgtacagagatcggtaaaattcgttactacaactgttcctgaatatctgacgaagaaacattcagccataacatccggccgtgtacatctcttttgcggtgcagggagtgctgtcgccatgtacttattgtcaccaggg

SEQ ID NO: 1185 - protein, 100 aa, Escherichia coli
LSGNHHINFFPACRRWYPGRVSKRSVPDGLIDIRAGCSHAAWNVRPYTLTASGRVQRSVKFVTTTVPEYLTKKHSAITSGRVHLFCGAGSAVAMYLLSPG

SEQ ID NO: 1186 - DNA, 1374 bp, Escherichia coli
aaccgacagcgccgaaacggagactgttcgagttaataggcgcatccgctatgaacgtgggagcctggtgataaccaagtaaccatcccgttcagcatgtgggcaagcatcttcgtggatgaggactatggcggtggcgggggcagaccggctgatccatcacggatatatgttcgaactgaaaggtgaaagctacaggaaaaagacagcgaaggcagtaacaagcgcgacttgatgtcgcactgaagggtgcggccagtatagttggcgcgagtcggcaaaactagttgacgtctaatacaaacggagctccccgtccctggatgatgatctggtggtgaatttatgcaccagcgaacacctgctgattcatcatccgatgctggaagggatcctgctgtctgaatgtgagcgcctgaagcaacattctctggcaaacaaactgatcagcctcttccgtcagtttggcggcacggagttacgtctcaaactggtctggctctgctggcttgacttaatgaccggaaacagccttgacgactggacgaaaaacctgaaacacaaatcagaaaaagatctggagcaatggatcattgcacgtcagggtcagagtgaaccactgacaaatctgatggatcagtacgtgcttatggcataccgtacatcggttgatgccgctcacagttgatgtctgataaccacagggctggcagcagaaaaccagccctgtggtaaaatacagtaatagcggcgtacatcaggcacgccgctcactcgtccacagatcatatacgtcattatactgcgcgataacggagggcttcagcacccggtcatttctgagcgggtatgaataccattgatgatgcgaagcagccacgggcagaaacgttcttcacaaccaggtgcctccatcttcactgcaggctgaatgtgccggcttgttatccaccagaaatggtatgctccggtacatgcataccccggagactataaacgcactgaatcatagcctcccacctcagcaggaggcagtcagctttcaggcggaaaaacgttgcagttaaagatcgtgagaatcgctgtttcgttgcatagcaacccgaacagttgtagttgaaacattttacctgcatcagcacatggtcaggcgccgtctgtatggcgtggaatactgatgtttcggctgatggcaagcctcattctctgtggaaacaggggcgcgcattagcttctcaaccagagagtgtcacaaagacaaatattgctgaaaatcgcattcatcgttcaggcgtgaatgcccggagacaaaagccgctgtccgcacagcccccctctgatctgaacaaaaagcatacacacaacaggctcacc

SEQ ID NO: 1187 - DNA, 366 bp, Escherichia coli
ctggatgatgatctggtggtgaatttatgcaccagcgaacacctgctgattcatcatccgatgctggaagggatcctgctgtctgaatgtgagcgcctgaagcaacattctctggcaaacaaactgatcagcctcttccgtcagtttggcggcacggagttacgtctcaaactggtctggctctgctggcttgacttaatgaccggaaacagccttgacgactggacgaaaaacctgaaacacaaatcagaaaaagatctggagcaatggatcattgcacgtcagggtcagagtgaaccactgacaaatctgatggatcagtacgtgcttatggcataccgtacatcggttgatgccgctcacagt

SEQ ID NO: 1188 - protein, 122 aa, Escherichia coli
LDDDLVVNLCTSEHLLIHHPMLEGILLSECERLKQHSLANKLISLFRQFGGTELRLKLVWLCWLDLMTGNSLDDWTKNLKHKSEKDLEQWIIARQGQSEPLTNLMDQYVLMAYRTSVDAAHS

SEQ ID NO: 1189 - DNA, 258 bp, Escherichia coli
ttgaaacattttacctgcatcagcacatggtcaggcgccgtctgtatggcgtggaatactgatgtttcggctgatggcaagcctcattctctgtggaaacaggggcgcgcattagcttctcaaccagagagtgtcacaaagacaaatattgctgaaaatcgcattcatcgttcaggcgtgaatgcccggagacaaaagccgctgtccgcacagcccccctctgatctgaacaaaaagcatacacacaacaggctcacc

SEQ ID NO: 1190 - protein, 86 aa, Escherichia coli
LKHFTCISTWSGAVCMAWNTDVSADGKPHSLWKQGRALASQPESVTKTNIAENRIHRSGVNARRQKPLSAQPPSDLNKKHTHNRLT

SEQ ID NO: 1191 - DNA, 5608 bp, Escherichia coli
agatggtgctggctgttgtcggcacgatgaaagcaggcaaatcaaccaccatcaacgccattgtggggcaggaaattctgcctaaccgtaaccgccccatgacctctgtaccgacgctcatccgccacgttcccggaaaaactgagccggttctccatctggaacatattcagcctgtccgcaatttattaatcacactgcaggaaaaactcgccaccccggcaggacagcaggtcgcacagaccctgcagcaaaccggggatacccgcgaactgctggatattctgacggatgatggctggctcaaaaatgaataccacggggaggaggaaatctttaccggactggcatcgttaaacgatctggttcgtcttgctgcggcaatgggactgaatttccttttgatgaatacgcagaagtgcagaaactgccggtgatcgacgtggaattcagccatctggtggggatggatgcatgccagggaacactcacactgctggatacccccggccctaatgaggccggacaaccgcagatggaagtgatgatgcgggatcaactgcagaaagcctctgcggttctggctgtgatggattacacccagatgaactcaaaagcggatgaagacgtccgtaaagagcttaatgccattgctgacgtatcagccggccgcctgtttgtactggtcaataaatttgatgagaaagaccgcaatggcgatggggcagatgccgtacgccagaaagttccggcaatgctgaacagcgatgtgctgcccgcctcccgcgtttatcccggatcctcacgccaggcatacctggctaaccgtgcgcttcatgagttacggaaaaacggaacccttcctgttgatgaagcctgggtcgatgattttgtcagggaagccttcggtcgcatgaaaaaagattacgtctgtaaagacagcgaactggcaactgaaggggcgacagacctgtgggaatgctcacttatcgatcaactgataacggaagtcatactgagttcacactccagagctgcggcactggcggttgattctgccgccgcaaaactgatgcagaatgcagaaaatatcagtgaatacctgtcgttacgccatcaggggctgatgcaaagtattcagtcactgcaggcgcatatcaccagcctgcttgaggatatccgggaaatagcagactgtcaggagcaagtgaccgctgatgtcagaatggccatggaggagatcgatgccagaacccgggaattactgacgggggtctgcacctcactggaagaggagctgaatgactatttcagaagcggtaaacgcaaagaacagcaaatgctggaggaagaaaattcagcgcagccccgggagagaaacgcattcgctttctttcacgatattttcggaaccggaaatcagcatgacaggatgcgggactttgatcccgacagccccgaaataaaattcagtgatcgcagggaagcccttgaactgatgacgcaaatcgaatcgaccgtgaccagcctgcaccgtgaggctgaagcacagttccggcctgagctggagaaaatcgtcagcgggattgaaacaggttttcgtggcacggccctgtacgccacagaaaacattgccggtcgcatcaatacccgcctggaggatgagggctttaccgtaaaaatcagttttccggcagtcagtcagttacaaacccggctcgcggtaaaaacaaatctgagtgcgcttatggaggaaagaacggagaccgtcacccgtcgccgtcggcagagtggtttatggggaaagatttgtggagcgtttggcaccagtgactggggctgggaaacctataaagaggatgtgagccgcagtgttatcaatatcaacaccgtcaggaaggaagttatgtcactgacccgggcatatttcggggagctgcaggcatccattgagcaggatattaaccagcccgtccgccaggaaatcgatgcctttttctgcgcattcagggagaaagttgaacaactgcgtaacacgctgattcagagctctgaagatcataaacgcgatcagcaggcacaggaacggcttaccaggcgacttcaggcattaaatgaaagggttcctgagctcattactgacagtaaggcgctgagggaagagctggagacaatgctgtgacttcaccatttattcaacaaattgctgataaccgggtatgtcaggtactcacctgtcttcctgaaaaatttgtggttgatttcgcaaacggaatcgatgttgcacaggagcatatccgcacggccggagagcgcacgttcttccggcgtttaaaagagggactgaccggcgaaggcgctgcacggcagaatgccatcaatgcttcgttgcacagggcttgaggcgtccctgcgctggctgacggagctgacaacgtcacttgccaccacaaactacgcgattacccgggtaaacgacagggtcagttcactggtcagtgatactgccaggctggcgcattattccgcagatacacgggagcagttactcatcctggccgatcaggttcaccataaactgaatcatcttgaagaaaaactccaccgtgttgaccaggttcagcgggcgcagttacatcttgagcagatattctcatggtggagcgccgggcgatatgcgtcattttcccctgccggacgttgttatgtggcgcttgaagagcttcgctggggcgcgtttggtgatgtgatacgtcagggcgaaacaggccaggttaaccagctactggatattctcagacataaagcattaacgcagatggcacaggagagtggcggtagtgcaaccgtgcgtctgaacactctggactggcttggtggtcagggccgggagcaggcagataacgagtggcatgacgcgattaactggctgggagactggtgcagtgaagagcagcatccggtgatctggtcaaccacgcaggctgcagaacacttaccggttcgcatgcctcgcctctgctctgcagaacgcctctctgaaagtatggtcgatgaaatatttcagaagggggctgcatgagtacagaaatgaaaacggggctggtgctgtccggtggcggggcggtgggcgcttatcaggcgggagtggttaaggcactggcagagtgtggtacacagatcagcatggtttcaggggccagcattggcgcattcaatggtgccattatcgcggcctctcccgatctgtcagaagctgccgtacgcctggaggcgctctgggatcatctggggaataatcaggtgctgtcggtaaaccgattggtttacttttcattgctgaaaaaattgttccaggcaatgaacctctgccagatccccggacgtgcaggagcactgcttacgacgcttcttcgccatatatcgatactcaacgggtttgacaatctgatggctcagccgttgttgtcagatgagcccctgacagcgctgttggatcattatcttgatactgatgctctggcagacgggctaccgctgtatgtgtcgctgtaccccacagaagggggcatgcaggatattattgactgcattcgtgctgaactgggtgccggaaccacgaaaaacgccgtttttcagcatatccagagcctgccccgcggacagcagaaagaggctctgcttgcgtcagccgcgctgcccctgctgttccgtccccgtgaggttcaggggacaatgttcggtgatggtggtatgggaggatggcgaaatatgcagggaaatacccctgtgacgcctctggtcgatgccggatgcaatatggtgattgtgacgcatctgagtgacggttctttatgggatcgccaggcttttccggacaccacaatccttgagatccgtccccggaaaaggctgaaatatgcaggtgatggtgacaacagcggcggtctgctcagtttcacgttggcacataccgacgcctggcgtcagcagggctatgaagacacgatgctgacgatggagcatatccggaaaccgctggcagcacgtcaggtactgtcccggtcagaaacggtgttgcagaaaagtctggagataacggaagaggcagatttggcactgagaaacgcgatggcccggattaaataaagacgccccaaagaaacgccaccgcctgtggtggtgtttttcctggctggtgttattgaaaatattttcagatatatattacctgagagaaagttttacccctcacctgtcaattcactcactggaaatttaattatgcaattacctgtaaagttattaatgagccttatatctctggtcagcgttattgcacgtgccgggaaatataaaaattacatccgggatgaaataaaatactggcgatatacatcatacaaggggggggaatttccggaaggtttcactgatgagaaattttccagcgccatttacaacggaagaatatttacaatgaaacgtttacataccctgatgttatttctggcggttctgtttactggctttaacgtggaagcagcgagcgtgaaacaagcgctcagctgcgacccaaacgcccgggctgaacaacctggagcgtgtccaacaacgtacgagttgtacgaaggtgacgctgcctacaaagctgcgcttgacaaagcattaaaaccggtcggactgagcggcatgttcggtaaaggcgggtatatggatggccctggcggaaacgtaacgccagtaaccattaacggtacagtctggctccagggcgacggttgcaaagccaatacctgcggctgggactttatcgtaacactctataacccaaaaacccatgaagtcgttggctaccgctactttggtttagatgacccggcctacctggtttggttcggcgaaattggcgtgcatgaattcgcgtatctggtgaaaaactacgtagctgcggttaactaatttaaggagtctgtcatgaaaacttttatcaaaactttactcgttgctgtaactattctgttctctgtcttcgctacggcgaaacaagtaaaactgccaaacaacatcaaatacgttaatactacagaggcgttttcctgtactgagattgacggtatgaattgccagacgaagaatccgtttaactataaagataacagctatgttttcgtgcttgaacgtggtggtgcctggtgttacgactacactgtctcggtacttaacctgaaaaccgggaaagcacagatgctcgaatacaaagacaaccagctgtgctcaggtagcaacaaaccgttcttcgaaatcaaaaatggcgtaccgacggtaggagtcatcgacacatccggaaaacctgtcgttgtggctctggacaaacttaaaacctgaggagtaaaccatgcgtttctctgcacattattaatatcaaaggtaaatacagccccagccattgttgccggaaagccgcttaatgcgtggctcgccagtgaaaggcttctcagacaataaacctcattcatttcacccgtcaggccgcgtcttctccgggagacgtggcttttttcatttattacaccagtaaatcttaaccaccgataaggagcaaagt

SEQ ID NO: 1192 - DNA, 240 bp, Escherichia coli
atgcagcagtcaatccaggagctctgttgtccggcaaccaccatatcaacttcttcccgggtgtggcggagaggtggtatcctggctgagtttcgaagcgaaccgttctttttgacgggcgcattttacgtccgggctgaatgtagtaacgcggcatggaacgtcggcccgtatggcccattgtgtcacgaacggtgcaatagtgatccacacccaacgcctgaaatcagatccaggggg

SEQ ID NO: 1193 - protein, 81 aa, Escherichia coli
VMQQSIQELCCPATTISTSSRVWRRGGILAEFRSEPFFLTGAFYVRAECSNAAWNVGPYGPLCHERCNSDPHPTPEIRSRG

SEQ ID NO: 1194 - DNA, 225 bp, Escherichia coli
atgcctgttaagtcgtgccgtgggtggagacagcttacttttccacagcaactgcagtcattcaggatgatcaggagatattctgtcaatgtcacgatcctgccattttcgtacccgctaagatacttccgttactggtgctgtccgcttttcaccatttcatcctcactgacaggcgttgcgttttgggtcatcaccacagctttacgtttctcttttaaccgg

SEQ ID NO: 1195 - protein, 75 aa, Escherichia coli
MPVKSCRGWRQLTFPQQLQSFRMIRRYSVNVTILPFSYPLRYFRYWCCPLFTISSSLTGVAFWVITTALRFSFNR

SEQ ID NO: 1196 - DNA, 375 bp, Escherichia coli
gtgttctccgctataacctccatatttgctgtctttttcttcataaatcgtatgcaatgtagcctgtctgtcaagacctcttctctgctgttgaggagacgatctcatttttggtcttttccgggagagaggctgtcagatgagcgagccggatttactgtcagaggtacaccccgtagcagacctgtgctcccatttccgcgatccggaaccaacaacgccctacggttaatactatttgaagcgtcaggtactgcaggaagttcccccctgcgcggacatcggttcctgccgacatctcacaatacggtcagactgtcatgcagtaacacccgcaatgcggtctgcggttttaagtgcaccgataatgcgtca

SEQ ID NO: 1197 - protein, 125 aa, Escherichia coli
VFSAITSIFAVFFFINRMQCSLSVKTSSLLLRRRSHFWSFPGERLSDERAGFTVRGTPRSRPVLPFPRSGTNNALRLILFEASGTAGSSPLRGHRFLPTSHNTVRLSCSNTRNAVCGFKCTDNAS

SEQ ID NO: 1198 - DNA, 1170 bp, Escherichia coli
atgtgggaagagcaggtgaggtgtattgtgggaaaggaactggatgatatctgcaccagctgtccgtatatcgatgctataaaacggcacaaacaacagctcggtgccatagaggaatatacacagtggttaaaaaaagaaccacgggcatcttatttttttctgttccggctgtatacccgcattcacaatacatttttccccaaaaagcaacaactcccgttcactcccggtggcactcactgcccggaacctgatgtcacccttcgggacttaacgctttccccgggctaccacagtgattatgcccctcaacccattccggagatggacagttctgctgttgttcccccaactaatgaaaacacctcgcctccggaagatactcccgacaacactccggccggaggcaataccggacaagcggaaaagaccagaaactcaggactcacacccattcctgaaaaacgttcaggaatgcccccggaacatctgcggtttgccacagggtttccaccgcaaccgaagattgccggtcccaaaggaaagccgatgcgcaccgtgcatccggataaaatctaccgtgaaattatatggttctgctccggttacctgcggaaatccggaccagaggctacgaggacgatcatcaactcaatattctgtgaatgggccagcatcttcaatgattactcctcccccttttcgtgggtggacagcagggacagtgaacagtgtgactggttatggaacgccatgcaggtccggtgtgtgggaaccccgctgaatccccttaccccggagcagaaatactggttcgcctgcgccacgtttgataactgggaaggctggaatgagcaacaggtacagtttttactggaaagtaatcccagacggaacagagcgaagtttacgcaggcctccttccaggcccccaggattcagcataaagcgattcttcttgatgagctgaaaagtgcccgggagcaacaaaaaaggcgtgatgaacgtgctgatggttccgtcccgctgaaactgtccggaaaaatccacaaacagcctgaaagtattgcccgaagtcgtggtgtcctcccaaaaaaactgctgaatgaaatgattgagcaggcgtaccaggactttgtggcaaatgagcaacacaagacactgagt

SEQ ID NO: 1199 - protein, 390 aa, Escherichia coli
MWEEQVRCIVGKELDDICTSCPYIDAIKRHKQQLGAIEEYTQWLKKEPRASYFFLFRLYTRIHNTFFPKKQQLPFTPGGTHCPEPDVTLRDLTLSPGYHSDYAPQPIPEMDSSAVVPPTNENTSPPEDTPDNTPAGGNTGQAEKTRNSGLTPIPEKRSGMPPEHLRFATGFPPQPKIAGPKGKPMRTVHPDKIYREIIWFCSGYLRKSGPEATRTIINSIFCEWASIFNDYSSPFSWVDSRDSEQCDWLWNAMQVRCVGTPLNPLTPEQKYWFACATFDNWEGWNEQQVQFLLESNPRRNRAKFTQASFQAPRIQHKAILLDELKSAREQQKRRDERADGSVPLKLSGKIHKQPESIARSRGVLPKKLLNEMIEQAYQDFVANEQHKTLS

SEQ ID NO: 1200 - DNA, 294 bp, Escherichia coli
ttgcttcagcctcaggtaaagatcaataggaagtctgtaatgcaacatatagaccgccttaatgtcattaaagcacttgtgcttctagaagatgagcagattgttcgttttaacatcgctgcgaacgataacgcctcgcagatccacatgctcgttgacggtctgggcgtcgggctgacacatgagcctgtcgctgccggaatgatttcgcaccggacagcttgtcaccgttctaggcaacatgacagacctgcgcattcctatttctattatctatccgcctaccaagttgct

SEQ ID NO: 1201 - protein, 98 aa, Escherichia coli
LLQPQVKINRKSVMQHIDRLNVIKALVLLEDEQIVRFNIAANDNASQIHMLVDGLGVGLTHEPVAAGMISHRTACHRSRQHDRPAHSYFYYLSAYQVA

SEQ ID NO: 1202 - DNA, 765 bp, Escherichia coli
atgagcgggcttacgattaatgcgctgtgcgccggttacggcaaacggcggattattgagcatctgtcgatttctacgctgccgcgcggcgaagtcactgtactgctggggcctaatggctgcggtaaatcaacgctactgcgcgccctggccgggctaaatcgcgccagtggcgaagcctggctgaatgaagagaatctcttatcgctgccgtttgctcgtcgggctgaaaaagttgtgttcctgccgcagtccctgccgcagggcgtgcatttacaggtgctggagtcggtggttgtcgcccagcgcgcctccggcgccgggcaaaatcaggcgcaggctatagcgctgctcgaagagctaggcatcgcacatctggcaatgaactacctcgatagcctgtccggcggtcagaagcagctggtggggcttgcacagtcgcttattcgccgccccgcattattattgctggatgaaccactgagcgcgctggatctcaattatcagttccatgtgatggatgttgtatcgcgcgaaacgcgaagacgcaatatggttacgctggtcgtcttacacgatatcaatatcgcactgcggcatgccgcccaggtcatcatgctgaaagaggggaaacttatcgacagcggcgacccgcaaacggtgatccatgcagagagccttgcgcaggtatacggcgtacgcgggagagttgaacgttgtgctcagggaagatcgatggtgatagtggatggtgcaatcgaaaaa

SEQ ID NO: 1203 - protein, 255 aa, Escherichia coli
MSGLTINALCAGYGKRRIIEHLSISTLPRGEVTVLLGPNGCGKSTLLRALAGLNRASGEAWLNEENLLSLPFARRAEKVVFLPQSLPQGVHLQVLESVVVAQRASGAGQNQAQAIALLEELGIAHLAMNYLDSLSGGQKQLVGLAQSLIRRPALLLLDEPLSALDLNYQFHVMDVVSRETRRRNMVTLVVLHDINIALRHAAQVIMLKEGKLIDSGDPQTVIHAESLAQVYGVRGRVERCAQGRSMVIVDGAIEK

SEQ ID NO: 1204 - DNA, 1056 bp, Escherichia coli
atgactgtattggaaagtacgctgtcggtcgagaaccgctatcgccagctttttcgccagcgtctggtaatactggcggttatttttatcgctatcattgcttcgctgctgctcgatttcaccctcggcccctcagggctccctttacattcgctgataaagactttgatgcatccgtccggggcgactaacggcatgcgggttatcgtttgggacatccgtttgccctatgcgctgatggcgctcctggtaggaatggcgctgggtttggccggggcagagatgcaaactattctgaataactccctcgccagcccgtttacgcttggcgtttcgtcggcggcggcctttggcgcagcgctggcgattgttctgggcatcggtattcccggcgttcccgaaagcgggtttataccggcaaacgcttttctttttgcgctcctgtccgccctgctgctcgatagtctgacccgctggacgcgcgtgccgacgtcgggcgttgtgctgtttgggattgcgctggtgtttaccttcaatgcgctggtgtccattatgcagtttgtcgccgatgaagatactttgcagggcctggtgttctggacgatgggcagcctggctcgcgcatcatgggagaaactggcggtgctggcggcggcgatggcgattgttttaccctggtcgctgcgtcgtgcctggcagcttaccgcgctacgcctcggcgaagagcgggcgatgagttttggcattgatgttcgccgtttgcgcctgggttccctgctgcgcatcagcctgctggcggccctttcggttgcgtttgtggggccaattggctttattggcctggttgcaccgcatatttcccgcctgttgctgggagaagatcatcgcttttatttgcccggaagcatccttatcggtgggctggtgctatcgctggcctcggtagcgtcgaagaacatcattcccggtgtcattttaccggtaggaattgttacctcgctggtaggcgttccgttctttctgagcattgtaatgcgtcatcgagggagtatgtca

SEQ ID NO: 1205 - protein, 352 aa, Escherichia coli
MTVLESTLSVENRYRQLFRQRLVILAVIFIAIIASLLLDFTLGPSGLPLHSLIKTLMHPSGATNGMRVIVWDIRLPYALMALLVGMALGLAGAEMQTILNNSLASPFTLGVSSAAAFGAALAIVLGIGIPGVPESGFIPANAFLFALLSALLLDSLTRWTRVPTSGVVLFGIALVFTFNALVSIMQFVADEDTLQGLVFWTMGSLARASWEKLAVLAAAMAIVLPWSLRRAWQLTALRLGEERAMSFGIDVRRLRLGSLLRISLLAALSVAFVGPIGFIGLVAPHISRLLLGEDHRFYLPGSILIGGLVLSLASVASKNIIPGVILPVGIVTSLVGVPFFLSIVMRHRGSMS

SEQ ID NO: 1206 - DNA, 987 bp, Escherichia coli
atgaaactctcccgtttatttccgctgctggcgctgctgctggcggccagcctgcacgcagaaaatacgcacaaggaggtgcgtatcgcgtcaccgtggccggcgcaaaataccattattgccatgctggggtacggcgataacattgtcggaacctcgatgattgcaaaaaggatccccctgtttcgccagagcctgccgcgcatagagaaagtcgcagcagttagcgtaaacagcgggcatgaaatcaatcccgaacagattatcgcgctgggggtcgatatgctttttgtaccgcagaatatggtagtgcctcaacaggcgttgctgaaacaggctggggtgcaggtgctggcgtttgaggcgaattcactgcgggcgttaacgcagcgcgtacagcaaacggcagcggtgctggggcccgatgcgcagcaaaaagcgctcgcctatcaacgctacttcgatcgcaacgtggccctggtcaccgggcgcctgaaagatcttcctgcgtcacagcgcgtgtcgctctatcacagtatgggcaatccgctgaccaccaccggtagaccctcgctaaaccaggactggattgacctggccggcggcaaaaatatcgctgaaaattggtttggcgagcatcaacaaaatcgttcgggtgaagtcgcgctggagaaaattgtcactgccaatccggcggttatcatcgcgatgaacaagcgcgacgcggatgccattctgagttctccgcagtgggcaagcgtggacgcggtcattcatcatcgcgtttacgttaatccgaaaggaatgttctggtggtgccgtgaaaccagcgaagaggcgctgcaatttttgtggctggcgaaaacgctttatcctgcgcgatttgctgatgtggatatacgcaaagagacgcgtgagttttatcggcagttctttggcctgacgttaagcgatgcgcagatgagcgatgtgctcaatccgccgcgc

SEQ ID NO: 1207 - protein, 329 aa, Escherichia coli
MKLSRLFPLLALLLAASLHAENTHKEVRIASPWPAQNTIIAMLGYGDNIVGTSMIAKRIPLFRQSLPRIEKVAAVSVNSGHEINPEQIIALGVDMLFVPQNMVVPQQALLKQAGVQVLAFEANSLRALTQRVQQTAAVLGPDAQQKALAYQRYFDRNVALVTGRLKDLPASQRVSLYHSMGNPLTTTGRPSLNQDWIDLAGGKNIAENWFGEHQQNRSGEVALEKIVTANPAVIIAMNKRDADAILSSPQWASVDAVIHHRVYVNPKGMFWWCRETSEEALQFLWLAKTLYPARFADVDIRKETREFYRQFFGLTLSDAQMSDVLNPPR

SEQ ID NO: 1208 - DNA, 2163 bp, Escherichia coli
atgaaaactcaaataactttcgctgcgcttttgccagcattagcgtctttcataccgcttcatgctcatgcctcgtctacttctgaagatgaaatgattgtcacgggcaacaccgccgccgacaccaccgattctgccgccggtgccggtttcaaaacgaacgatatagatgtcggcccgctgggaacgaaatcctggatcgaaacaccatattccagcaccactgttactaaagagatgattgaaaatcagcaggcgcaaagcgtcagcgagatgctgaaatactctcccagtacgcaaatgcaggcgcgcggtggaatggatgtcgggcgtccgcaaagtcgggggatgcagggcagcgtggtggccaacagccgtctggacgggctgaatatcgtttcaacaaccgcgtttccggtggaaatgcttgagcgcatggatgtgcttaacagtttgaccggcgcgctgtacggcccggcgagcccagcagggcagtttaatttcgtggcgaagcgcccaaccgaagagacgctgcgtaaagtgacgctgggctatcaaagccgcagtgcgtttaccggccatgccgatctgggtggccattttgatgaaaacaaacggtttggctatcgcgtgaacctgcttgatcaggaaggggaaggcaatgtggatgacagcacgctgcgtcgcaaactcgtttccgttgcgctcgactggaatattcagccgggcactcagctacagctcgacgccagccattacgaatttatccagaaaggctatgtcggtagctttaactatgggccgaacgtcaaactgccgtctgcgccgaatccgaaggacaaaaatctggcgctcagcactgcgggcaacgacctcactaccgataccatcagcactcgcctgatccactactttaacgacgactggtccatgaacgctggcgtgggctggcagcaggctgaccgcgcgatgcgtagtgtttccagtaaaatactcaacaatcagggcgatatctctcgttcgatgaaggattccaccgctgccggacgttttcgcgtcctgagcaacaccgccgggctgaatggtcatattgataccggctctatcggccacgatctgtcactttctaccacgggatatgtctggtcgctttatagtgccaaaggaacaggttccagctatagctggggtacaacaaatatgtatcacccggatgcgatagatgagcagggcgatggcaaaatccgcaccggcgggccgcgataccgctccagcgtaaatactcagcagagcgttacgctcggcgatacggtgacatttacgccgcagtggtcggcaatgttctatctcagccagagctggctgcagactaaaaactacgataagcacggtaatcaaacgaaccaggttgatgaaaatggtttaagtccgaacgccgcgctgatgtataaaattacccctaacacaatggcctacgttagctatgccgattcgctggagcagggcggtaccgcaccgacggatgagagcgtaaaaaatgccggtcaaacgctaaacccgtatcgcagcaagcagtatgaagtggggctaaaatcggacatcggcgagatgaatctaggcgccgcgctgttccgactggaacgtccgtttgcctatcttgatacggataacgtgtataaagagcagggtaaccaggttaacaacggccttgagttaaccgctgccgggaatgtgtggcaggggctgaatatttacagcggcgtgaccttcctcgacccgaaactgaaagatacggcgaatgcctcaaccagcaataaacaggttgtcggcgtgccgaaagtgcaggccaatctgttggcggaatacagtttgccgtccataccggaatgggtttacagcgctaacgtccattatacgggcaaacgcgcggcgaacgataccaacacctcttacgccagcagctataccacatgggatttgggaacgcgttacaccacgaaagtgagcaacgtcccaaccactttccgcgtggtggtaaacaacgtgtttgataaacattactgggcttctatcttcccatcgggtaccgatggcgataacggttccccaagtgcgtttatcggcggcggccgcgaagtgcgtgcatccgtcaccttcgatttc

SEQ ID NO: 1209 - protein, 721 aa, Escherichia coli
MKTQITFAALLPALASFIPLHAHASSTSEDEMIVTGNTAADTTDSAAGAGFKTNDIDVGPLGTKSWIETPYSSTTVTKEMIENQQAQSVSEMLKYSPSTQMQARGGMDVGRPQSRGMQGSVVANSRLDGLNIVSTTAFPVEMLERMDVLNSLTGALYGPASPAGQFNFVAKRPTEETLRKVTLGYQSRSAFTGHADLGGHFDENKRFGYRVNLLDQEGEGNVDDSTLRRKLVSVALDWNIQPGTQLQLDASHYEFIQKGYVGSFNYGPNVKLPSAPNPKDKNLALSTAGNDLTTDTISTRLIHYFNDDWSMNAGVGWQQADRAMRSVSSKILNNQGDISRSMKDSTAAGRFRVLSNTAGLNGHIDTGSIGHDLSLSTTGYVWSLYSAKGTGSSYSWGTTNMYHPDAIDEQGDGKIRTGGPRYRSSVNTQQSVTLGDTVTFTPQWSAMFYLSQSWLQTKNYDKHGNQTNQVDENGLSPNAALMYKITPNTMAYVSYADSLEQGGTAPTDESVKNAGQTLNPYRSKQYEVGLKSDIGEMNLGAALFRLERPFAYLDTDNVYKEQGNQVNNGLELTAAGNVWQGLNIYSGVTFLDPKLKDTANASTSNKQVVGVPKVQANLLAEYSLPSIPEWVYSANVHYTGKRAANDTNTSYASSYTTWDLGTRYTTKVSNVPTTFRVVVNNVFDKHYWASIFPSGTDGDNGSPSAFIGGGREVRASVTFDF

SEQ ID NO: 1210 - DNA, 2382 bp, Escherichia coli
atgcacgaaaagaacatcgccctgctttgtgatgaagccgaccgacttttgcaactgaacattaatctgctccggcaaatggttgaggagccagatgtgttatctgacagtaagaacgaaaacagactgctttttgataaacagaaagcactgaaaagaattgaggagctggagggcgaacaaatcaaaaccgcccgcagggagatggtgctggctgttgtcggcacgatgaaagcaggcaaatcaaccaccatcaacgccattgtggggcaggaaattctgcctaaccgtaaccgccccatgacctctgtaccgacgctcatccgccacgttcccggaaaaactgagccggttctccatctggaacatattcagcctgtccgcaatttattaatcacactgcaggaaaaactcgccaccccggcaggacagcaggtcgcacagaccctgcagcaaaccggggatacccgcgaactgctggatattctgacggatgatggctggctcaaaaatgaataccacggggaggaggaaatctttaccggactggcatcgttaaacgatctggttcgtcttgctgcggcaatgggactgaatttcccttttgatgaatacgcagaagtgcagaaactgccggtgatcgacgtggaattcagccatctggtggggatggatgcatgccagggaacactcacactgctggatacccccggccctaatgaggccggacaaccgcagatggaagtgatgatgcgggatcaactgcagaaagcctctgcggttctggctgtgatggattacacccagatgaactcaaaagcggatgaagacgtccgtaaagagcttaatgccattgctgacgtatcagccggccgcctgtttgtactggtcaataaatttgatgagaaagaccgcaatggcgatggggcagatgccgtacgccagaaagttccggcaatgctgaacagcgatgtgctgcccgcctcccgcgtttatcccggatcctcacgccaggcatacctggctaaccgtgcgcttcatgagttacggaaaaacggaacccttcctgttgatgaagcctgggtcgatgattttgtcagggaagccttcggtcgcatgaaaaaagattacgtctgtaaagacagcgaactggcaactgaaggggcgacagacctgtgggaatgctcacttatcgatcaactgataacggaagtcatactgagttcacactccagagctgcggcactggcggttgattctgccgccgcaaaactgatgcagaatgcagaaaatatcagtgaatacctgtcgttacgccatcaggggctgatgcaaagtattcagtcactgcaggcgcatatcaccagcctgcttgaggatatccgggaaatagcagactgtcaggagcaagtgaccgctgatgtcagaatggccatggaggagatcgatgccagaacccgggaattactgacgggggtctgcacctcactggaagaggagctgaatgactatttcagaagcggtaaacgcaaagaacagcaaatgctggaggaagaaaattcagcgcagccccgggagagaaacgcattcgctttctttcacgatattttcggaaccggaaatcagcatgacaggatgcgggactttgatcccgacagccccgaaataaaattcagtgatcgcagggaagcccttgaactgatgacgcaaatcgaatcgaccgtgaccagcctgcaccgtgaggctgaagcacagttccggcctgagctggagaaaatcgtcagcgggattgaaacaggttttcgtggcacggccctgtacgccacagaaaacattgccggtcgcatcaatacccgcctggaggatgagggctttaccgtaaaaatcagttttccggcagtcagtcagttacaaacccggctcgcggtaaaaacaaatctgagtgcgcttatggaggaaagaacggagaccgtcacccgtcgccgtcggcagagtggtttatggggaaagatttgtggagcgtttggcaccagtgactggggctgggaaacctataaagaggatgtgagccgcagtgttatcaatatcaacaccgtcaggaaggaagttatgtcactgacccgggcatatttcggggagctgcaggcatccattgagcaggatattaaccagcccgtccgccaggaaatcgatgcctttttctgcgcattcagggagaaagttgaacaactgcgtaacacgctgattcagagctctgaagatcataaacgcgatcagcaggcacaggaacggcttaccaggcgacttcaggcattaaatgaaagggttcctgagctcattactgacagtaaggcgctgagggaagagctggagacaatgctg

SEQ ID NO: 1211 - protein, 794 aa, Escherichia coli
MHEKNIALLCDEADRLLQLNINLLRQMVEEPDVLSDSKNENRLLFDKQKALKRIEELEGEQIKTARREMVLAVVGTMKAGKSTTINAIVGQEILPNRNRPMTSVPTLIRHVPGKTEPVLHLEHIQPVRNLLITLQEKLATPAGQQVAQTLQQTGDTRELLDILTDDGWLKNEYHGEEEIFTGLASLNDLVRLAAAMGLNFPFDEYAEVQKLPVIDVEFSHLVGMDACQGTLTLLDTPGPNEAGQPQMEVMMRDQLQKASAVLAVMDYTQMNSKADEDVRKELNAIADVSAGRLFVLVNKFDEKDRNGDGADAVRQKVPAMLNSDVLPASRVYPGSSRQAYLANRALHELRKNGTLPVDEAWVDDFVREAFGRMKKDYVCKDSELATEGATDLWECSLIDQLITEVILSSHSRAAALAVDSAAAKLMQNAENISEYLSLRHQGLMQSIQSLQAHITSLLEDIREIADCQEQVTADVRMAMEEIDARTRELLTGVCTSLEEELNDYFRSGKRKEQQMLEEENSAQPRERNAFAFFHDIFGTGNQHDRMRDFDPDSPEIKFSDRREALELMTQIESTVTSLHREAEAQFRPELEKIVSGIETGFRGTALYATENIAGRINTRLEDEGFTVKISFPAVSQLQTRLAVKTNLSALMEERTETVTRRRRQSGLWGKICGAFGTSDWGWETYKEDVSRSVININTVRKEVMSLTRAYFGELQASIEQDINQPVRQEIDAFFCAFREKVEQLRNTLIQSSEDHKRDQQAQERLTRRLQALNERVPELITDSKALREELETML

SEQ ID NO: 1212 - DNA, 708 bp, Escherichia coli
atgccatcaatgcttcgttgcacagggcttgaggcgtccctgcgctggctgacggagctgacaacgtcacttgccaccacaaactacgcgattacccgggtaaacgacagggtcagttcactggtcagtgatactgccaggctggcgcattattccgcagatacacgggagcagttactcatcctggccgatcaggttcaccataaactgaatcatcttgaagaaaaactccaccgtgttgaccaggttcagcgggcgcagttacatcttgagcagatattctcatggtggagcgccgggcgatatgcgtcattttcccctgccggacgttgttatgtggcgcttgaagagcttcgctggggcgcgtttggtgatgtgatacgtcagggcgaaacaggccaggttaaccagctactggatattctcagacataaagcattaacgcagatggcacaggagagtggcggtagtgcaaccgtgcgtctgaacactctggactggcttggtggtcagggccgggagcaggcagataacgagtggcatgacgcgattaactggctgggagactggtgcagtgaagagcagcatccggtgatctggtcaaccacgcaggctgcagaacacttaccggttcgcatgcctcgcctctgctctgcagaacgcctctctgaaagtatggtcgatgaaatatttcagaagggggctgca

SEQ ID NO: 1213 - protein, 236 aa, Escherichia coli
MPSMLRCTGLEASLRWLTELTTSLATTNYAITRVNDRVSSLVSDTARLAHYSADTREQLLILADQVHHKLNHLEEKLHRVDQVQRAQLHLEQIFSWWSAGRYASFSPAGRCYVALEELRWGAFGDVIRQGETGQVNQLLDILRHKALTQMAQESGGSATVRLNTLDWLGGQGREQADNEWHDAINWLGDWCSEEQHPVIWSTTQAAEHLPVRMPRLCSAERLSESMVDEIFQKGAA

SEQ ID NO: 1214 - DNA, 1068 bp, Escherichia coli
atgagtacagaaatgaaaacggggctggtgctgtccggtggcggggcggtgggcgcttatcaggcgggagtggttaaggcactggcagagtgtggtacacagatcagcatggtttcaggggccagcattggcgcattcaatggtgccattatcgcggcctctcccgatctgtcagaagctgccgtacgcctggaggcgctctgggatcatctggggaataatcaggtgctgtcggtaaaccgattggtttacttttcattgctgaaaaaattgttccaggcaatgaacctctgccagatccccggacgtgcaggagcactgcttacgacgcttcttcgccatatatcgatactcaacgggtttgacaatctgatggctcagccgttgttgtcagatgagcccctgacagcgctgttggatcattatcttgatactgatgctctggcagacgggctaccgctgtatgtgtcgctgtaccccacagaagggggcatgcaggatattattgactgcattcgtgctgaactgggtgccggaaccacgaaaaacgccgtttttcagcatatccagagcctgccccgcggacagcagaaagaggctctgcttgcgtcagccgcgctgcccctgctgttccgtccccgtgaggttcaggggacaatgttcggtgatggtggtatgggaggatggcgaaatatgcagggaaatacccctgtgacgcctctggtcgatgccggatgcaatatggtgattgtgacgcatctgagtgacggttctttatgggatcgccaggcttttccggacaccacaatccttgagatccgtccccggaaaaggctgaaatatgcaggtgatggtgacaacagcggcggtctgctcagtttcacgttggcacataccgacgcctggcgtcagcagggctatgaagacacgatgctgacgatggagcatatccggaaaccgctggcagcacgtcaggtactgtcccggtcagaaacggtgttgcagaaaagtctggagataacggaagaggcagatttggcactgagaaacgcgatggcccggattaaa

SEQ ID NO: 1215 - protein, 356 aa, Escherichia coli
MSTEMKTGLVLSGGGAVGAYQAGVVKALAECGTQISMVSGASIGAFNGAIIAASPDLSEAAVRLEALWDHLGNNQVLSVNRLVYFSLLKKLFQAMNLCQIPGRAGALLTTLLRHISILNGFDNLMAQPLLSDEPLTALLDHYLDTDALADGLPLYVSLYPTEGGMQDIIDCIRAELGAGTTKNAVFQHIQSLPRGQQKEALLASAALPLLFRPREVQGTMFGDGGMGGWRNMQGNTPVTPLVDAGCNMVIVTHLSDGSLWDRQAFPDTTILEIRPRKRLKYAGDGDNSGGLLSFTLAHTDAWRQQGYEDTMLTMEHIRKPLAARQVLSRSETVLQKSLEITEEADLALRNAMARIK

SEQ ID NO: 1216 - DNA, 16373 bp, Escherichia coli
tgctgctgccccccgggattcctcgattcgttgctgcatccactgctccacctcacttttgtaccagcggctgctgcgccccagtttgatgggtttagggaaatgaccttcactgatcagcttgtaaaaccatttatctgtcatgccagtgaaactggtgatgtagttcatgtcgatcaggggatcgtcggcacgcagcaatacgctgtcgtggcttgttgtggtcaacatggtcagaatgtcctctgtgagatttatgaaggttgggcaaatgcgggtgaatctactgaacggagttttcagagctggcctgctaccggataccagggattaccggcaaggtaacgggcttccggatcgcgtacaccacgacgatcgcgggcgaaatcactgaacgcccagatcagcgcttgaaatatctcttcgcagtccggtgaacgactgtccagcaccacatcccgggtgatctgcttctggtacggtgccgcttcacccggtgacatgaagcccagtacgttgctccaggcatcaagaatcagccgatccagttcagagccatcgaaatactcctgtctgacgcacagcaccacgtggtattccggcttttcaggatgacgagtcaggagccagcagagatcacgtccggaggttacattcatcagcgcactgacggtttcgataaagtccataccgaaccagatctttctgctgctgaaggtacggtcatattcacatggcagacgaagcaggatccgtcgtatccgggagccggactgctcacgcagcgcacgctcaaggataccgatgattttgttctgataagacggccagaagggtgccaggctatagtcgaaataaggaatagcattcataagatatgttccgttatgcgcagcccacagtgcgtcctgcccgtgaatgagctgacgtgttatggcttgcggatgagattgatggaataagtgaagaactgaagcagaacgggaagatccggtaaccggcaaggaacagaacaccggattcaggttcaggatgaatgatctccgttgacttcagttcacatcattaatcaatgcggtaagtttttaccgacggagtgtttccaggagcggaggctcaggccttaagcttcagaagtgaggcttacgaggacgccctgcagcaggacgttcaggaacttcattgcagccgtaggcacacagcccgtctttttgttcttctttcgccagataatgcagggcaccgcgaatattatcgatgctttcaggatcgttgtggcgcacaggaatgttgatgttgtatgcataatgcggctgatatgtacagcggtgcgccgaaccacagttatacgtaattgcctgccagcattccgctatccgctccgcaaagggatatatatttttttaaccctctgacgatcgatccagaaaacgacatgcgcatgaaaaccatgatcagccgtccattcaatcacccagaagaaaccaacgatattttcaaattgttctacctgctccagcagcatacgcaactgcaattcaagccagcgatgatcaggttgtaagaaatcaggcgtatctttcctgtagaagaaatccatgcgtaaggcccgcaggcaggaatagcgtgccatcatttgattgatgtgattgtcaagtaaagcggtaaaaaaccagtttggtgtgtaagatttaggcatgttgatgactcctgaaagttaatgatgttttaagctctgtgagcgaattaatgctttcgctcataatcagatctaaaacggtaataacttacagatggtatttatcaggcatgctgtaacagaatggatacgacggattattaacgacacacagcgttgtgctgaagggtatgagttatctgatggcattgtctatagagatgagataaacgaggtgcgaagaaaatacagattcaatacaacacagtgaaatactagactggccccctgaaataccagacagtagatgtatcttaaaataagaggtaggcttggatatatgtctaacactagttctaattttgagattgctggcgttttgttaggaaaagaggtgcgtaaacgtaaaacacctcagaaaaaaaatcgcaattattcaacagactatggagcctggcatgactgtgtcccacgtggcacgtttgcatggcattcagcccagcctgttgtttaagtggaaaaaacaatacctggaaggaagcctcactgctgttgctgccggtgaagacgttgttcctgcttctgaactggccgctgcgataaagcagattaatcagcttcagcgtttactgggcaagaaaacaatggaagttgagatcctcaaagaagcggtggagtacgcacaatcgcgaaaatggatagcgcatgtgcccttgttaccttcggacaaggaatagctccggtaagccgtgttctgggcgtgtcgcgtgcgcagctaacattacggatgaaggcatctgataacaagccagataaacggcgtcagagacgcgatgaggctgcggatgcagaagtcttatcgcgcatcctggatatcattggcgatatgccagcatatgggtatcgccgtgtctgggcgatactcagacggcagtcccgaaatgaaggcttgccgttcgtgaatgcaaagcgcgtttaccgaataatgagcgaaaacagcctgttgttgttacatgacaaaccatcacggctgcagcgggaacataaaggccgaatatcggtgaaggaaagcgaccagcgttggtgttctgatggcttcgagttcggttgtgatgatggcgaaaaagtccgggttacgttcgccctggactgttgtgatcgtgaagccatcgactgggcagccagtacgggaggttacgataaagcgacagtacaggatgtgatgtcaggagcgatagaaaaaggctttggcgataaagtgccggaagagcccatccagtggctgacagataacggttcagcgtacagagcgcatgaaacacggcagttcgccagagagctgaatctggagccctgcacgacggcagtcagcagtcctcagagtaatggaatggcagacggttcgtgaaaacgatgaaggaagactacatcgcgttcatgccgaaaccgaatgtaagaacggcagtgcataaccttgcagtagcgatcgagcattacaatgaaaaccatccgcacagtgcgttgggttatcgctctccgcgagaatatcgacgtcagcgggtaacgttaacttaagatacatccactgtctggcatttcaaggggtggctcaagttttttcagacagttgaactagtataccaatacattcttgttcagcatcaatgatacatgcttggtatgtcggaaagaaaacagatgcttgttttacgatatatccacagccataacattgataccatttccagcctttttcctgaatgtaggaaatatgtagaaaaagtggcaagactgattcgtctgagtacccctgttttttagcattttcaatgcataacaattgcgaattatatgcgttatctgattgagacaaaagatatccatttttctcatgacaataccatctccatttattgtcatcagttttataaaatttccatattaatctctgattgccagatatcttataaatcataatatgctccactccccagggaaacgaccctggggaaggtaattagtgctcttttatatatgcggctctgtgacgttcaagttcaattgcaccacgatgtgataaccagcaaaaaatgatgcaacaaataataccgcagccaagaagataaaatccgccatgccagccaatatgatcgaccataataccaaacaggctggtgcccagagatgcaccgaagatatagctcataaaaccacgtaaacctaccgcggagccaacagcaaagctgggcacgatctccatagtctgaacggaagccagaaattgtggaacgtaaatcagacaaccaacaatggcagcaaaaattgtcaccataaacaacgattcacttttccagtagccaatcaggcaaatgaaaatcagcgccatacaaatcatcgccaatggcatacgacgccctttaaacagtttgtctgacaaccaaccggcaagtagcgtggaagggatcgcggcccattcaaaaaataaaaatgcgacgctcatttgttcttttgaaaaatgtttcaccgtcagcagataaataggcaaccagctaatcatcccgaagcgcaccatgtatacaaatacgtcaaccagtgagacataccaggcatttttattgcgtaatacataagtgcagaaaatctgaaaggcgctcatgttttctggtgcttttaccgtctgtcgggtattcaggacgactttttcttccggcatcatctcttccagagagggtagaccttcctgatgtggggaacctttaccgagaatcagcacaattaccgcaaaaacgatggccacgcaggccggaacgatataactcgcactttgccagtgctcgctgccgagtagggcaaaagcggcaccaacaatcggtgcaacaataccaccaccgatgttatgagagatattccagaaagcaccaacccgaccacgctcccggcgagggaaccagttagcaatagtgatgaaagaaggaccaacgcccattccctggaaaagaccattcagaataaccaatgccgcaaaaatccagaatgcggtgctgaatcccaggccaacgttaacgatggcacataacaccagcccacacgccataaagactttcggactggctttatcggcaaggctactcatcactcctttgctgataccataggcgataagcatacagctactcagtacgccaatttgtgtggcgctgagatctaattgctctttaagataaggcgttgataaggtgaaattattacgcacgatatagtatgcaagataccccagaaatacgctaagtaacgcctgcatacgatagcgacgatatgtcacctgaattttctccgccggaacactatccgccgcttgccccgttttaaatattgataacatgtcttcacctgtattttatattgatatgaacatcaggagtattctgacaatgagagttatataattgagatgaaatatcaaactgaaaaaatgtgtcacaattgacacaaaataataaaatcaaagcctgtttttgacccattttattgatgcatagacagggcagatttatgctttatctggtttgttgttagcatgtgcggatattaacaaatctcatgctgattatcgggtaatctctgattaatatattaacggtctctttgaacagacgtgttatcagacgaagtgtctgaaacgggtaatttttgtctcaatgcgatttttgcggtgtattaatatttatgacctggatcacaaaccgattctttagttggtgcgaaatcggcatcaaaaccatgattcttttactgttgttgatggatgtcggggccgtcagggctcaacgaaatgaactggtgatggccaccacattctcacccggagctatcgcgtggataatacagcgctggcaaacagagcctgagtcggtaatgatccgtacgcttaaccgcaccagtgcctcactggaacagttgcttgatacggccaacgtagaaaacgtcgatctgatcctgacttcatcaccaatgctgctccagcaccttcaggagcaccagaaactggccccgtttgatgatgcacccgcagaaagccaaaacctggtgccggagtcgatccgtgcaacctccgttgcagtagcaatatcaggttttggtctgcttattaatcgtcctgcgctttctgtaaaacaccttcctgcccctgctgactgggacgatcttgctttgccgatctatcaggacgctttattgatgagtagtccgtcgcgttcagatactaaccatttaatggttgagtcattactacagcaaaaaggctgggtgaaaggatgggaaacgttgctgacaagtgcaggaaacctggtgacaatctcctcccgcagttttggcgtagccgataaaataaaaagcggactcggcgttgccggccccgttatcgataactatgctaatttactgttaaatgacccccatatctcttttacctatttcccccggtctgcggtatcccccacctacgttgcaattctcaggaaaagcccacacgccgatgcagcccgtcgctttattcactacctgttaagtccgaaaggacagcgtattctggccgatgccaatacaggaaaatatccggtgacatcacttgccgcagacaatccgcgggcaacgcaacaacagctcctgatgaatcaacccccgctgaattatcaccttatcctgaaacgtcagcgtctggtgcagcgcttgtttgatacggcaattagctttcggttcgcacagctaaaagatgcctggcgagcgctgcacagtaccgaggcacgcctgaagaaaccattaccagaaatacgtgcactgttaacacaaatgccagttgcagcggccagtagtgaagatcccgtctggctggcacagttcgataacaaaagctttgccgagcagcaaatgatggaatggcaactctggtttctgaataaccagcgcctggcgataaaaaaactggaagagctgaaatgaaaaacataacgctgtggcagcgtttaagacaggtcagtatcagtaccagcttacgttgcgcatttctgatgggggcacttctgaccctgattgtcagtagtgtcagtctgtattcatggcatgaacaaagctcacaaattcgttactcgctggataagtattttccccgtattcactctgctttccttattgaagggaacctgaatctggtggtagaccagctaaatgaatttttgcaggctcccaacaccacggtgcgattgcaacttcgtacccagattattcagcatctcgacaccatagaacggcttagtaggggactgtcatcccgggaacgccaacaactgacggtcattttgcaggacagtcgatcactgttatccgagttggatcgtgcgctttacaacatgtttttactacgggaaaaggtgagtgagctatcagcgcggattgactggttacacgatgattttactaccgagcttaattctttagtgcaggatttcacctggcagcagggaacgctgctggatcaaatcgcctcccgacagggcgatacggcgcaatacctgaagcgatctcgtgaagtgcaaaatgaacagcagcaggtttataccctggcacgcattgaaaatcagattgttgacgatctgcgtgacagactcaatgagctcaaatcaggacgtgatgacgacatacaggtggaaactcatctccgttattttgaaaatctgaaaaaaacggcagatgaaaatatacgtatgctggatgactggcctggcaccattaccctgaggcagaccatcgatgaattgctggatatgggaatcgtaaaaaacaaaatgccggatacgatgcgtgaatatgtcgccgcccaaaaagccttagaggatgccagtcgcaccagggaagcgacacagggtcgcttcagaacgttactggaagcgcagcttggcagtactcatcaacaaatgcagatgtttaatcaacgaatggaacaaattgttcacgttagcggtgggctgatcctggtggcgacagcactggcgttactgcttgcatgggtattcaaccattattttatccgctcacggttggtgaaacgctttaccctactgaatcaggccgttgtgcaaattggtctgggaggcacggaaacgactattccagtttatgggaatgatgaactggggagaattgcaggattattacgccatactctcggccaactcaatgtgcaaaaacagcaacttgaacaagaaattaccgatcgtaaggtgatagaagccgatctgcgtgccacccaggacgaactgattcagacagcaaagttggcggtagtcgggcaaacgatgaccacgctggcccacgagatcaatcagccgctaaatgcgctgtcaatgtatctgtttacagcccgcagggccattgaacagacccagaaagaacaggccagcatgatgcttggtaaagccgaaggggtgattagtcgtattgacgccattatccgttcactacggcagtttacccggcgcgccgaactggaaacatcactccatgccgttgatttagcacagatgttcagtgcggcctgggaacttctggccatgcgtcatcgctctctgcaagctacgcttgttctgccgcaaggtacagccacagtttcaggtgatgaggtcagaacccagcaggtactggttaacgtactggcgaatgcgcttgatgtttgtgggcaaggcgctgtcattaccgttaactggcaaatgcagggtaaaacgctgaacgtattcattggcgataatggcccgggctggcctgaggcattgttgccttcgttattgaagccgtttaccaccagtaaagaagtaggactgggtattggtctttcaatttgtgtgtcgttgatggagcaaatgaaaggggaattgcggctggcatcaacgatgaccaggaatgcctgtgtggtactgcaattcagactaacggatgtggaagatgctaagtagtgaatattcgattctgctgattgatgatgatgctgacgtgctggacgcctacacacagttacttgaacagtcgggctatcgtgtttttgcctgtaacaatccttttgaggcgcaggcgtggatacaaccagactggccaggcattgtgctaagtgatgtgtgtatgcctggctgctctggtatcgatttgatgatgttattccaccaggatgatcaacagctccccattctgcttatcaccgggcacggcgatgtgccaatggcagttgatgcggtgaaaaaaggcgcgtgggattttttgcaaaaaccggtcgatcccggcaaattgctttctctggttgaagaggcactacgccagcgtcaatcaatcattgcgcgtcgtcagtattgccaacagacattgcaggtggagttgatagggagaagtgaatggataaatcagtatcggcgacgtttacagcagttgtctgagacagatattgccgtctggctctacggtgcccctggcacaggacggatgaccggtgcacgttatctgcaccaatttggacgtaatgcacaaggcgaatttgtctaccgcgagctgacaccagacaatgcaccacagcttaatgatttcattgcgctggctcaggggggaacattagtgctcagccatcctgaacacctgacgcgtgaacagcagtaccatctggttcagttacaaagccaggaacacagaccttttcgcctgattggtattggagacacctcgctggtcgagctggccgccagcaaccatatcatcgcggagctctattactgctttgcaatgacacaaatcgcttgcctgccattaactcaacgccccgacgatattgaaccactgtttcgccattacctttgtaaagcatgtcaacggcttaaccatcctgttccggaagtgggaaaagagatgctcaaagagatgatgcgccgcatgtggccaaataatgtgcgagagctggccaatgcagcagaactatttactgtaggagtattaccgctggcagaaacagcaaatccgttgatgcacgtcggaaccccgacaccgcttgacagacgagtggaggacgctgagcgacagataatcacagaggcgcttaatatccatcaggggcgtatcaatgaggttgctgaatatttacaaatcccacggaaaaaactctatctcagaatgaaaaaatacggtcttagtaaggagcattataaaatttaaccatcagacttgtgcgcttgttcataatgttatgtcattgcctgatgttgataaaaagacggacgctccccctgtaagacctgtctcttatacacaagtccccacccggggatttgtgatgtctgtcagtctgctttagggggggctctttccatccggtactttccttcctccccggtagccattttttgaactttttcttcacccgttgatcttctcttatatttcattttattcgactctgttatggtactttctgattgttattcatgggctaacgagcagtttggacatgcccgtctcgatgatccgcgtagtacacgacgccttgtatcactggcctcttctctcgctcatgccaggtcgtgatcgattcagatgccattttgcaccttcagaatttgagcttgctgcagttgttcctgataaggatctggataaatatgacgagtatttaccagagtctttgcttgcgaaagggtacggggcaaaggcgtatgatatagaaagaacgagcatctggttgctgaaacaccttcagtggactggatatatagtcagtgtataaatgcttgtttatacccttatttttttacttacctgtggacttacttggctttagtcccggagtattgccaggagtatctttattatcgcgtcggcgttgatccggttttcctaccgacttagcaattggttttggacctggtttaagacccatgatagttatccttcgagatgtaagaggaatgccctcaacattggtatattctatactgagaaatttttcaatggaaatgttcaacggccgaatgattaacttgatattgtgagcaatatctttttttggcacagagcgaaccgttagattgcgcgtatttttatggaaggagatcatccaataacggttactcaccgatcttcttcatggtaatacgcacctgttttattaacatatagaaaaattactccggcatgttttatctttttgaaatcaggacatttaccagatcacttaaaactctcttttgttcttcatcctgaagatattgaatccggaatttaatctcttctgccacccgtcttgtatcggactcattaagtatttttgttattcgctgtctctgatgttcaggctggtcttccatatttcgtaaaaccagatgaaataatatatcataaagtgcgcaatgccatgaataaccatcattggttaaaataagctcccaaacccgctcctgctcggcaataagctgcagaacaaaggactcaacctgttctgtttgttcggggacaacacggtatagcggagcaatcacagcaaaagacagttcatttaaccaggattccgcttccttctcgctcctgaacgatggacagttttgtattcttcgttcgtattcacgggtaatctgctccagaatatcctccggcggtgtcagccacttattcctgagcaatacactggttgatggatgacagctggctatttcagcaataatttcacgtaatgtctccgggctgaacttcttcagctgattgtagtgctcccgggtaaaaccatgttcatcgcataaaagttgccatgtcattgacacactgtccgccatatctttcttcatcattaatacctgttacctgaatatcaacagaccggtgtaccttttctgaatatctccccggacgggctggcaatccccattcgcctcagcgtggcatctgcagctttcgccacttcgctgatatccagcttttcaggtagcggcggggacgatatctgcgccagacaataattccggcgcaacaacaaccactcccgttgtgcttctgtacattcaacatttcccataacaaaaagccagcgggcagaagctctgcgccagcaacccgccgcctccagcttctgtgcaaccatgtcttccacgacttccggggtactatttttcctgctcaaaacatcaactcactgaaataatactcatatatgacggtctcagcgaaccgtccatgccgggctgaaatcctcttcctgaaacaactccgtcagtccgctaatctgtttcagcctcagcacttcatcctggtccatccccaggctctgtaccaatgcgttcatccgtccagcccaggcgtgacaggtccctgacaatatcagacattgaggttatctggtgtttacccctggcccggttatgccgtatggtggccgccatacgtgtggcctgtccctttctttccggattaatacaggccactggcaaccagcctttcaggcgttttcctgtacctgcttccctgcccagtaactgacgatgaaaaccatccaccaccagataggggttcttctccgccgacaccaccacgggttgggtgaaaccatcttttctccagtgactgcttcagcagtttcttctcacccggcgccatgacattggggttataatcgttggccaccacctcatctgctttcacccacagcacacagtccacaggctcctgtgcaaaagggctgacttcatgaagtaccctgcgcagatgattcagagcctgtaatagtctctttttctgatcgttcctggctgaagtactgacgaatcatgtcactcagtacctccacttcaggtgtcacagaatcccccattcattcctcctttccttcatacgctgcaggtaacgttcatagtgccggggtttgttcgggctgaaggacagcgtccggcaccagaaatcattctttataagagtcttacagatacgtcgccaggacgggatatcccggcagcccaggtcattctcctgttcatcgggaatgtcatccgggaagccccgcgtctgataccagcgcagatagacagctatcttgttgcggtaatgttctgctgttctttccggcatcacatccagcagaaacatcgcgtagctgcgccaggtatgatgggctggttttgatatgcgcttgcgcagggcaaaataagcaccgctttcattggcataaagtgccccgctggcagcccctgatacccgctcacacatcctggcccaggtatccggctccagaacatggtaaagccacagtcccttacgttgttcaggaccaaaaggttcacagacacgcatgttgcgtaacggtacgccggcacggtacatcaggtcatacaggggattgtagatggcacgggttctggtgtgatatatccagatatcacgagttttccagtcatacagtggatacatggtgtagtaaaacccttcaggcgatgccgtggtccagggcttatcatcggcgtatctcagtttgcgctgggacaccagtcccatgaaccggttaagggactcatccgcacggacaccggtcagtactgccacaccacatttattgtctgcaaaccaggaagaaaatgccggaacaaattcttcaaacgtcatggcataccgataaaatgggaaatacgtcatgtctgtaatggcctcttccggtggctggcgaacccaggtcactcctggctcccagcatatccactccggctgaaactgcgagacgccgtttaccgtggtcaggggaagtgccacccagtaaaaggtttccgtcacatcatggtacatttcccgcatcttctgaatatgttcaatggtgcactggtactgagcctcccagtcaataaacagtacagagaaacgacgttttttcctgcgggccacatcagccaaaagatggaaaagcacggtggaatctttacccccggaaaaagagagacaaactgatggaaatgtttcaaaaatccactcaatacgagcaattgctgcacgcagaacattctctccagtaaggactttctccgttaataaattatcattcatttatttttactttatgcaaaagaaacccgttgatatctccaatacatagcaacaaacattaaataatatttaattaattattacagagatcgtttttacccttatatataaagtaagctacatacataaattttttcaataagagatttttattgctgatactggcactgtaacaatcccagtaagagaacgattaataaccacccactcatgtggttcaaccagccaggagtttacatgttctgaatcaataaaatcatggcaatataatatatctgaagcaggtatatccaattccagtttaacacgtccgtgatattcattcgcatcattaaaagaattcaatatatccatctcaaaagaaattaccccctcccccctcatctctgctgtttcttttaactcagcaatcatatctgcatacctgccattaagtttcctgcctaactggacagttgtaattttcttttcgttgcagcatcgctgagtatgttcatatatagccatcacttcccggcaaatacaatcaacttctatatcactcaaagaattatatatatccataacttttctctcataacgcaaaaaacgattaaatatacgataatgagagagcaaatcaggatttattacttttattaaaaataaagttaataaaacataacctatctgtttgctaccattaaacccaataaaatcacttaccacatctcctttcaatctacctgttccgatacaacgagctaacaattcactcctgacattatatttaccattcatattcgccacactatcctgaacaacaaatgatcaccaaaatgcgtttaaataccctacaaacaaactatctcactgaataaattgcaacacttccccttccacaacgtcctaaaggctttatataaaaacagcaaaaacgaattagttatgcaaagtcatttatatgaaacccagccattaaccaatgttataatcagcatcccataacgcgaacattatcactttcaccattattttttgcccatatttttaattgttccatgagttgagcattaaaatcatcatcgggttcaaagtcatcaggatcataacactccccttcaaacaaattaattataagattttgaatcttttcttttaatttttcatcgcgcgaaattcgattaaatgctgtatagggtttatctttccccaactcctcaccacctaaaaaacgctcaaaatcgggggcactccaacgatgatatacttttttcccattattcctgcattttataatctcatttctaatgatcgtattaagcgtccatgaaccattattcgaaccatatctacgataaggccaatcaatatcatgtacaatcccaaaatctgctttaaaatgatttaacatctttatcaaaggaaccagaaccgccttacctctggctctgacaatacttaccttacctgacatctcatgtttttctttagtgattgctgaaataaatgccgcatgttcagtatcaccttcaacaataattggataactcccaaaaaatatttcagcaaaaccaatatctgtaagttgtagtgcctgtaaattatctttctcatcaggtgagaagttagcttcatcagccacatacaagcgtggagaaagtgatttcccatctgttgaacgttgcatacgagcaatcgtagtatgatcctcaagagggtttataaagtatggtgaatgagttgttaatagcacctgccaatctggatgtttaccaagttcataaagatgcgcttgcgccgctctggcagccattgggtgtaacgcattttctggctcatccattaaaagaatatatccgggcaaggctggatcgtctgtatcttcaggaacaggggcgccattttcaatagcatctatttgttgtttcagcagatttatattttcactttttacatttttcctcacctcttttttaagttgttctctaaaggatttaagaagagcttctcgcttttcattttgtcggctaatttcattatgaacctggagcattgcccaaaaaagagctcgtcttgctcctgtcccctgttgcccaatgcgagagtttcccgcagcctctttgactaataaaccagacccctgctttaataaattgtctattttaagctcaggtggattcatttcaacactgagctgaacaccaagagcaggaaagacatgttgaaaccctgtctgaatttgtcgagaaatagaagaaaatcgttcttgatgaggttcagcgatctcatttacagctttaaccaaagctgctttaacttttgatatttgtgactctttattacactccagagccttcaactctttcactaagggagtcaacgcaagagtgagcaatgtctcttctgtagtcgctgcatcatccagtgatctaattcgcattggtcttggcaaacgtgatttaaaaacattatcggctccaccggccttgctgtcctctgaccagtcttcagtctgaggatcccatgtttttcttgttggttttcccgtttcatcccaaacccataaactgaaccgccccgggtttcctggagagtgttttatctgtgaactcag

SEQ ID NO: 1217 - DNA, 2007 bp, Escherichia coli
atgaaaaacataacgctgtggcagcgtttaagacaggtcagtatcagtaccagcttacgttgcgcatttctgatgggggcacttctgaccctgattgtcagtagtgtcagtctgtattcatggcatgaacaaagctcacaaattcgttactcgctggataagtattttccccgtattcactctgctttccttattgaagggaacctgaatctggtggtagaccagctaaatgaatttttgcaggctcccaacaccacggtgcgattgcaacttcgtacccagattattcagcatctcgacaccatagaacggcttagtaggggactgtcatcccgggaacgccaacaactgacggtcattttgcaggacagtcgatcactgttatccgagttggatcgtgcgctttacaacatgtttttactacgggaaaaggtgagtgagctatcagcgcggattgactggttacacgatgattttactaccgagcttaattctttagtgcaggatttcacctggcagcagggaacgctgctggatcaaatcgcctcccgacagggcgatacggcgcaatacctgaagcgatctcgtgaagtgcaaaatgaacagcagcaggtttataccctggcacgcattgaaaatcagattgttgacgatctgcgtgacagactcaatgagctcaaatcaggacgtgatgacgacatacaggtggaaactcatctccgttattttgaaaatctgaaaaaaacggcagatgaaaatatacgtatgctggatgactggcctggcaccattaccctgaggcagaccatcgatgaattgctggatatgggaatcgtaaaaaacaaaatgccggatacgatgcgtgaatatgtcgccgcccaaaaagccttagaggatgccagtcgcaccagggaagcgacacagggtcgcttcagaacgttactggaagcgcagcttggcagtactcatcaacaaatgcagatgtttaatcaacgaatggaacaaattgttcacgttagcggtgggctgatcctggtggcgacagcactggcgttactgcttgcatgggtattcaaccattattttatccgctcacggttggtgaaacgctttaccctactgaatcaggccgttgtgcaaattggtctgggaggcacggaaacgactattccagtttatgggaatgatgaactggggagaattgcaggattattacgccatactctcggccaactcaatgtgcaaaaacagcaacttgaacaagaaattaccgatcgtaaggtgatagaagccgatctgcgtgccacccaggacgaactgattcagacagcaaagttggcggtagtcgggcaaacgatgaccacgctggcccacgagatcaatcagccgctaaatgcgctgtcaatgtatctgtttacagcccgcagggccattgaacagacccagaaagaacaggccagcatgatgcttggtaaagccgaaggggtgattagtcgtattgacgccattatccgttcactacggcagtttacccggcgcgccgaactggaaacatcactccatgccgttgatttagcacagatgttcagtgcggcctgggaacttctggccatgcgtcatcgctctctgcaagctacgcttgttctgccgcaaggtacagccacagtttcaggtgatgaggtcagaacccagcaggtactggttaacgtactggcgaatgcgcttgatgtttgtgggcaaggcgctgtcattaccgttaactggcaaatgcagggtaaaacgctgaacgtattcattggcgataatggcccgggctggcctgaggcattgttgccttcgttattgaagccgtttaccaccagtaaagaagtaggactgggtattggtctttcaatttgtgtgtcgttgatggagcaaatgaaaggggaattgcggctggcatcaacgatgaccaggaatgcctgtgtggtactgcaattcagactaacggatgtggaagatgctaag

SEQ ID NO: 1218 - protein, 669 aa, Escherichia coli
MKNITLWQRLRQVSISTSLRCAFLMGALLTLIVSSVSLYSWHEQSSQIRYSLDKYFPRIHSAFLIEGNLNLVVDQLNEFLQAPNTTVRLQLRTQIIQHLDTIERLSRGLSSRERQQLTVILQDSRSLLSELDRALYNMFLLREKVSELSARIDWLHDDFTTELNSLVQDFTWQQGTLLDQIASRQGDTAQYLKRSREVQNEQQQVYTLARIENQIVDDLRDRLNELKSGRDDDIQVETHLRYFENLKKTADENIRMLDDWPGTITLRQTIDELLDMGIVKNKMPDTMREYVAAQKALEDASRTREATQGRFRTLLEAQLGSTHQQMQMFNQRMEQIVHVSGGLILVATALALLLAWVFNHYFIRSRLVKRFTLLNQAVVQIGLGGTETTIPVYGNDELGRIAGLLRHTLGQLNVQKQQLEQEITDRKVIEADLRATQDELIQTAKLAVVGQTMTTLAHEINQPLNALSMYLFTARRAIEQTQKEQASMMLGKAEGVISRIDAIIRSLRQFTRRAELETSLHAVDLAQMFSAAWELLAMRHRSLQATLVLPQGTATVSGDEVRTQQVLVNVLANALDVCGQGAVITVNWQMQGKTLNVFIGDNGPGWPEALLPSLLKPFTTSKEVGLGIGLSICVSLMEQMKGELRLASTMTRNACVVLQFRLTDVEDAK

SEQ ID NO: 1219 - DNA, 1221 bp, Escherichia coli
atgttatcaatatttaaaacggggcaagcggcggatagtgttccggcggagaaaattcaggtgacatatcgtcgctatcgtatgcaggcgttacttagcgtatttctggggtatcttgcatactatatcgtgcgtaataatttcaccttatcaacgccttatcttaaagagcaattagatctcagcgccacacaaattggcgtactgagtagctgtatgcttatcgcctatggtatcagcaaaggagtgatgagtagccttgccgataaagccagtccgaaagtctttatggcgtgtgggctggtgttatgtgccatcgttaacgttggcctgggattcagcaccgcattctggatttttgcggcattggttattctgaatggtcttttccagggaatgggcgttggtccttctttcatcactattgctaactggttccctcgccgggagcgtggtcgggttggtgctttctggaatatctctcataacatcggtggtggtattgttgcaccgattgttggtgccgcttttgccctactcggcagcgagcactggcaaagtgcgagttatatcgttccggcctgcgtggccatcgtttttgcggtaattgtgctgattctcggtaaaggttccccacatcaggaaggtctaccctctctggaagagatgatgccggaagaaaaagtcgtcctgaatacccgacagacggtaaaagcaccagaaaacatgagcgcctttcagattttctgcacttatgtattacgcaataaaaatgcctggtatgtctcactggttgacgtatttgtatacatggtgcgcttcgggatgattagctggttgcctatttatctgctgacggtgaaacatttttcaaaagaacaaatgagcgtcgcatttttattttttgaatgggccgcgatcccttccacgctacttgccggttggttgtcagacaaactgtttaaagggcgtcgtatgccattggcgatgatttgtatggcgctgattttcatttgcctgattggctactggaaaagtgaatcgttgtttatggtgacaatttttgctgccattgttggttgtctgatttacgttccacaatttctggcttccgttcagactatggagatcgtgcccagctttgctgttggctccgcggtaggtttacgtggttttatgagctatatcttcggtgcatctctgggcaccagcctgtttggt

SEQ ID NO: 1220 - protein, 454 aa, Escherichia coli
MLSIFKTGQAADSVPAEKIQVTYRRYRMQALLSVFLGYLAYYIVRNNFTLSTPYLKEQLDLSATQIGVLSSCMLIAYGISKGVMSSLADKASPKVFMACGLVLCAIVNVGLGFSTAFWIFAALVILNGLFQGMGVGPSFITIANWFPRRERGRVGAFWNISHNIGGGIVAPIVGAAFALLGSEHWQSASYIVPACVAIVFAVIVLILGKGSPHQEGLPSLEEMMPEEKVVLNTRQTVKAPENMSAFQIFCTYVLRNKNAWYVSLVDVFVYMVRFGMISWLPIYLLTVKHFSKEQMSVAFLFFEWAAIPSTLLAGWLSDKLFKGRRMPLAMICMALIFICLIGYWKSESLFMVTIFAAIVGCLIYVPQFLASVQTMEIVPSFAVGSAVGLRGFMSYIFGASLGTSLFGIMVDHIGWHGGFYLLGCGIICCIIFCWLSHRGAIELERHRAAYIKEH

SEQ ID NO: 1221 - DNA, 1245 bp, Escherichia coli
atgctaagtagtgaatattcgattctgctgattgatgatgatgctgacgtgctggacgcctacacacagttacttgaacagtcgggctatcgtgtttttgcctgtaacaatccttttgaggcgcaggcgtggatacaaccagactggccaggcattgtgctaagtgatgtgtgtatgcctggctgctctggtatcgatttgatgatgttattccaccaggatgatcaacagctccccattctgcttatcaccgggcacggcgatgtgccaatggcagttgatgcggtgaaaaaaggcgcgtgggattttttgcaaaaaccggtcgatcccggcaaattgctttctctggttgaagaggcactacgccagcgtcaatcaatcattgcgcgtcgtcagtattgccaacagacattgcaggtggagttgatagggagaagtgaatggataaatcagtatcggcgacgtttacagcagttgtctgagacagatattgccgtctggctctacggtgcccctggcacaggacggatgaccggtgcacgttatctgcaccaatttggacgtaatgcacaaggcgaatttgtctaccgcgagctgacaccagacaatgcaccacagcttaatgatttcattgcgctggctcaggggggaacattagtgctcagccatcctgaacacctgacgcgtgaacagcagtaccatctggttcagttacaaagccaggaacacagaccttttcgcctgattggtattggagacacctcgctggtcgagctggccgccagcaaccatatcatcgcggagctctattactgctttgcaatgacacaaatcgcttgcctgccattaactcaacgccccgacgatattgaaccactgtttcgccattacctttgtaaagcatgtcaacggcttaaccatcctgttccggaagtgggaaaagagatgctcaaagagatgatgcgccgcatgtggccaaataatgtgcgagagctggccaatgcagcagaactatttactgtaggagtattaccgctggcagaaacagcaaatccgttgatgcacgtcggaaccccgacaccgcttgacagacgagtggaggacgctgagcgacagataatcacagaggcgcttaatatccatcaggggcgtatcaatgaggttgctgaatatttacaaatcccacggaaaaaactctatctcagaatgaaaaaatacggtcttagtaaggagcattataaaatt

SEQ ID NO: 1222 - protein, 418 aa, Escherichia coli
MWKMLSSEYSILLIDDDADVLDAYTQLLEQSGYRVFACNNPFEAQAWIQPDWPGIVLSDVCMPGCSGIDLMMLFHQDDQQLPILLITGHGDVPMAVDAVKKGAWDFLQKPVDPGKLLSLVEEALRQRQSIIARRQYCQQTLQVELIGRSEWINQYRRRLQQLSETDIAVWLYGAPGTGRMTGARYLHQFGRNAQGEFVYRELTPDNAPQLNDFIALAQGGTLVLSHPEHLTREQQYHLVQLQSQEHRPFRLIGIGDTSLVELAASNHIIAELYYCFAMTQIACLPLTQRPDDIEPLFRHYLCKACQRLNHPVPEVGKEMLKEMMRRMWPNNVRELANAAELFTVGVLPLAETANPLMHVGTPTPLDRRVEDAERQIITEALNIHQGRINEVAEYLQIPRKKLYLRMKKYGLSKEHYKI

SEQ ID NO: 1223 - DNA, 1194 bp, Escherichia coli
atggatgtcggggccgtcagggctcaacgaaatgaactggtgatggccaccacattctcacccggagctatcgcgtggataatacagcgctggcaaacagagcctgagtcggtaatgatccgtacgcttaaccgcaccagtgcctcactggaacagttgcttgatacggccaacgtagaaaacgtcgatctgatcctgacttcatcaccaatgctgctccagcaccttcaggagcaccagaaactggccccgtttgatgatgcacccgcagaaagccaaaacctggtgccggagtcgatccgtgcaacctccgttgcagtagcaatatcaggttttggtctgcttattaatcgtcctgcgctttctgtaaaacaccttcctgcccctgctgactgggacgatcttgctttgccgatctatcaggacgctttattgatgagtagtccgtcgcgttcagatactaaccatttaatggttgagtcattactacagcaaaaaggctgggtgaaaggatgggaaacgttgctgacaagtgcaggaaacctggtgacaatctcctcccgcagttttggcgtagccgataaaataaaaagcggactcggcgttgccggccccgttatcgataactatgctaatttactgttaaatgacccccatatctcttttacctatttcccccggtctgcggtatcccccacctacgttgcaattctcaggaaaagcccacacgccgatgcagcccgtcgctttattcactacctgttaagtccgaaaggacagcgtattctggccgatgccaatacaggaaaatatccggtgacatcacttgccgcagacaatccgcgggcaacgcaacaacagctcctgatgaatcaacccccgctgaattatcaccttatcctgaaacgtcagcgtctggtgcagcgcttgtttgatacggcaattagctttcggttcgcacagctaaaagatgcctggcgagcgctgcacagtaccgaggcacgcctgaagaaaccattaccagaaatacgtgcactgttaacacaaatgccagttgcagcggccagtagtgaagatcccgtctggctggcacagttcgataacaaaagctttgccgagcagcaaatgatggaatggcaactctggtttctgaataaccagcgcctggcgataaaaaaactggaagagctgaaa

SEQ ID NO: 1224 - protein, 435 aa, Escherichia coli
LSQCDFCGVLIFMTWITNRFFSWCEIGIKTMILLLLLMDVGAVRAQRNELVMATTFSPGAIAWIIQRWQTEPESVMIRTLNRTSASLEQLLDTANVENVDLILTSSPMLLQHLQEHQKLAPFDDAPAESQNLVPESIRATSVAVAISGFGLLINRPALSVKHLPAPADWDDLALPIYQDALLMSSPSRSDTNHLMVESLLQQKGWVKGWETLLTSAGNLVTISSRSFGVADKIKSGLGVAGPVIDNYANLLLNDPHISFTYFPRSAVSPTYVAILRKSPHADAARRFIHYLLSPKGQRILADANTGKYPVTSLAADNPRATQQQLLMNQPPLNYHLILKRQRLVQRLFDTAISFRFAQLKDAWRALHSTEARLKKPLPEIRALLTQMPVAAASSEDPVWLAQFDNKSFAEQQMMEWQLWFLNNQRLAIKKLEELK

SEQ ID NO: 1225 - DNA, 1230 bp, Escherichia coli
atgaatgataatttattaacggagaaagtccttactggagagaatgttctgcgtgcagcaattgctcgtattgagtggatttttgaaacatttccatcagtttgtctctctttttccgggggtaaagattccaccgtgcttttccatcttttggctgatgtggcccgcaggaaaaaacgtcgtttctctgtactgtttattgactgggaggctcagtaccagtgcaccattgaacatattcagaagatgcgggaaatgtaccatgatgtgacggaaaccttttactgggtggcacttcccctgaccacggtaaacggcgtctcgcagtttcagccggagtggatatgctgggagccaggagtgacctgggttcgccagccaccggaagaggccattacagacatgacgtatttcccattttatcggtatgccatgacgtttgaagaatttgttccggcattttcttcctggtttgcagacaataaatgtggtgtggcagtactgaccggtgtccgtgcggatgagtcccttaaccggttcatgggactggtgtcccagcgcaaactgagatacgccgatgataagccctggaccacggcatcgcctgaagggttttactacaccatgtatccactgtatgactggaaaactcgtgatatctggatatatcacaccagaacccgtgccatctacaatcccctgtatgacctgatgtaccgtgccggcgtaccgttacgcaacatgcgtgtctgtgaaccttttggtcctgaacaacgtaagggactgtggctttaccatgttctggagccggatacctgggccaggatgtgtgagcgggtatcaggggctgccagcggggcactttatgccaatgaaagcggtgcttattttgccctgcgcaagcgcatatcaaaaccagcccatcatacctggcgcagctacgcgatgtttctgctggatgtgatgccggaaagaacagcagaacattaccgcaacaagatagctgtctatctgcgctggtatcagacgcggggcttcccggatgacattcccgatgaacaggagaatgacctgggctgccgggatatcccgtcctggcgacgtatctgtaagactcttataaagaatgatttctggtgccggacgctgtccttcagcccgaacaaaccccggcactatgaacgttacctgcagcgtatgaaggaaaggaggaatgaatgggggattctg

SEQ ID NO: 1226 - protein, 410 aa, Escherichia coli
MNDNLLTEKVLTGENVLRAAIARIEWIFETFPSVCLSFSGGKDSTVLFHLLADVARRKKRRFSVLFIDWEAQYQCTIEHIQKMREMYHDVTETFYWVALPLTTVNGVSQFQPEWICWEPGVTWVRQPPEEAITDMTYFPFYRYAMTFEEFVPAFSSWFADNKCGVAVLTGVRADESLNRFMGLVSQRKLRYADDKPWTTASPEGFYYTMYPLYDWKTRDIWIYHTRTRAIYNPLYDLMYRAGVPLRNMRVCEPFGPEQRKGLWLYHVLEPDTWARMCERVSGAASGALYANESGAYFALRKRISKPAHHTWRSYAMFLLDVMPERTAEHYRNKIAVYLRWYQTRGFPDDIPDEQENDLGCRDIPSWRRICKTLIKNDFWCRTLSFSPNKPRHYERYLQRMKERRNEWGIL

SEQ ID NO: 1227 - DNA, 1230 bp, Escherichia coli
atgtctaacactagttctaattttgagattgctggcgttttgttaggaaaagaggtgcgtaaacgtaaaacacctcagaaaaaaatcgcaattattcaacagactatggagcctggcatgactgtgtcccacgtggcacgtttgcatggcattcagcccagcctgttgtttaagtggaaaaaacaatacctggaaggaagcctcactgctgttgctgccggtgaagacgttgttcctgcttctgaactggccgctgcgataaagcagattaatcagcttcagcgtttactgggcaagaaaacaatggaagttgagatcctcaaagaagcggtggagtacgcacaatcgcgaaaaatggatagcgcatgtgcccttgttaccttcggacaaggaatagctccggtaagccgtgttctgggcgtgtcgcgtgcgcagctaacattacggatgaaggcatctgataacaagccagataaacggcgtcagagacgcgatgaggctgcggatgcagaagtcttatcgcgcatcctggatatcattggcgatatgccagcatatgggtatcgccgtgtctgggcgatactcagacggcagtcccgaaatgaaggcttgccgttcgtgaatgcaaagcgcgtttaccgaataatgagcgaaaacagcctgttgttgttacatgacaaaccatcacggctgcagcgggaacataaaggccgaatatcggtgaaggaaagcgaccagcgttggtgttctgatggcttcgagttcggttgtgatgatggcgaaaaagtccgggttacgttcgccctggactgttgtgatcgtgaagccatcgactgggcagccagtacgggaggttacgataaagcgacagtacaggatgtgatgtcaggagcgatagaaaaaggctttggcgataaagtgccggaagagcccatccagtggctgacagataacggttcagcgtacagagcgcatgaaacacggcagttcgccagagagctgaatctggagccctgcacgacggcagtcagcagtcctcagagtaatggaatggcagacttcgtgaaaacgatgaaggaagactacatcgcgttcatgccgaaaccgaatgtaagaacggcagtgcataaccttgcagtagcgatcgagcattacaatgaaaaccatccgcacagtgcgttgggttatcgctctccgcgagaatatcgacgtcagcgggtaacgttaact

SEQ ID NO: 1228 - protein, 410 aa, Escherichia coli
MSNTSSNFEIAGVLLGKEVRKRKTPQKKIAIIQQTMEPGMTVSHVARLHGIQPSLLFKWKKQYLEGSLTAVAAGEDVVPASELAAAIKQINQLQRLLGKKTMEVEILKEAVEYAQSRKMDSACALVTFGQGIAPVSRVLGVSRAQLTLRMKASDNKPDKRRQRRDEAADAEVLSRILDIIGDMPAYGYRRVWAILRRQSRNEGLPFVNAKRVYRIMSENSLLLLHDKPSRLQREHKGRISVKESDQRWCSDGFEFGCDDGEKVRVTFALDCCDREAIDWAASTGGYDKATVQDVMSGAIEKGFGDKVPEEPIQWLTDNGSAYRAHETRQFARELNLEPCTTAVSSPQSNGMADFVKTMKEDYIAFMPKPNVRTAVHNLAVAIEHYNENHPHSALGYRSPREYRRQRVTLT

SEQ ID NO: 1229 - DNA, 231 bp, Escherichia coli
atgttgaccacaacaagccacgacagcgtattgctgcgtgccgacgatcccctgatcgacatgaactacatcaccagtttcactggcatgacagataaatggttttacaagctgatcagtgaaggtcatttccctaaacccatcaaactggggcgcagcagccgctggtacaaaagtgaggtggagcagtggatgcagcaacgaatcgaggaatcccggggggcagcagca

SEQ ID NO: 1230 - protein, 77 aa, Escherichia coli
MLTTTSHDSVLLRADDPLIDMNYITSFTGMTDKWFYKLISEGHFPKPIKLGRSSRWYKSEVEQWMQQRIEESRGAAA

SEQ ID NO: 1231 - DNA, 729 bp, Escherichia coli
ctgaacctgaatccggtgttctgttccttgccggttaccggatcttcccgttctgcttcagttcttcacttattccatcaatctcatccgcaagccataacacgtcagctcattcacgggcaggacgcactgtgggctgcgcataacggaacatatcttatgaatgctattccttatttcgactatagcctggcacccttctggccgtcttatcagaacaaaatcatcggtatccttgagcgtgcgctgcgtgagcagtccggctcccggatacgacggatcctgcttcgtctgccatgtgaatatgaccgtaccttcagcagcagaaagatctggttcggtatggactttatcgaaaccgtcagtgcgctgatgaatgtaacctccggacgtgatctctgctggctcctgactcgtcatcctgaaaagccggaataccacgtggtgctgtgcgtcagacaggagtatttcgatggctctgaactggatcggctgattcttgatgcctggagcaacgtactgggcttcatgtcaccgggtgaagcggcaccgtaccagaagcagatcacccgggatgtggtgctggacagtcgttcaccggactgcgaagagatatttcaagcgctgatctgggcgttcagtgatttcgcccgcgatcgtcgtggtgtacgcgatccggaagcccgttaccttgccggtaatccctggtatccggtagcaggccagctc

SEQ ID NO: 1232 - protein, 243 aa, Escherichia coli
LNLNPVFCSLPVTGSSRSASVLHLFHQSHPQAITRQLIHGQDALWAAHNGTYLMNAIPYFDYSLAPFWPSYQNKIIGILERALREQSGSRIRRILLRLPCEYDRTFSSRKIWFGMDFIETVSALMNVTSGRDLCWLLTRHPEKPEYHVVLCVRQEYFDGSELDRLILDAWSNVLGFMSPGEAAPYQKQITRDVVLDSRSPDCEEIFQALIWAFSDFARDRRGVRDPEARYLAGNPWYPVAGQL

SEQ ID NO: 1233 - DNA, 324 bp, Escherichia coli
atgcctaaatcttacacaccaaactggttttttaccgctttacttgacaatcacatcaatcaaatgatggcacgctattcctgcctgcgggccttacgcatggatttcttctacaggaaagatacgcctgatttcttacaacctgatcatcgctggcttgaattgcagttgcgtatgctgctggagcaggtagaacaatttgaaaatatcgttggtttcttctgggtgattgaatggacggctgatcatggttttcatgcgcatgtcgttttctggatcgatcgtcagagggttaaaaaaatatatatccctttgcggagcgga

SEQ ID NO: 1234 - protein, 108 aa, Escherichia coli
MPKSYTPNWFFTALLDNHINQMMARYSCLRALRMDFFYRKDTPDFLQPDHRWLELQLRMLLEQVEQFENIVGFFWVIEWTADHGFHAHVVFWIDRQRVKKIYIPLRSG

SEQ ID NO: 1235 - DNA, 375 bp, Escherichia coli
gtggagcatattatgatttataagatatctggcaatcagagattaatatggaaattttataaaactgatgacaataaatggagatggtattgtcatgagaaaaatggatatcttttgtctcaatcagataacgcatataattcgcaattgttatgcattgaaaatgctaaaaaacaggggtactcagacgaatcagtcttgccactttttctacatatttcctacattcaggaaaaaggctggaaatggtatcaatgttatggctgtggatatatcgtaaaacaagcatctgttttctttccgacataccaagcatgtatcattgatgctgaacaagaatgtattggtatactagttcaactgtctgaaaaaact

SEQ ID NO: 1236 - protein, 125 aa, Escherichia coli
VEHIMIYKISGNQRLIWKFYKTDDNKWRWYCHEKNGYLLSQSDNAYNSQLLCIENAKKQGYSDESVLPLFLHISYIQEKGWKWYQCYGCGYIVKQASVFFPTYQACIIDAEQECIGILVQLSEKT

SEQ ID NO: 1237 - DNA, 321 bp, Escherichia coli
gtgagtaaccgttattggatgatctccttccataaaaatacgcgcaatctaacggttcgctctgtgccaaaaaaagatattgctcacaatatcaagttaatcattcggccgttgaacatttccattgaaaaatttctcagtatagaatataccaatgttgagggcattcctcttacatctcgaaggataactatcatgggtcttaaaccaggtccaaaaccaattgctaagtcggtaggaaaaccggatcaacgccgacgcgataataaagatactcctggcaatactccgggactaaagccaagtaagtccacaggtaag

SEQ ID NO: 1238 - protein, 107 aa, Escherichia coli
VSNRYWMISFHKNTRNLTVRSVPKKDIAHNIKLIIRPLNISIEKFLSIEYTNVEGIPLTSRRITIMGLKPGPKPIAKSVGKPDQRRRDNKDTPGNTPGLKPSKSTGK

SEQ ID NO: 1239 - DNA, 642 bp, Escherichia coli
atgatgaagaaagatatggcggacagtgtgtcaatgacatggcaacttttatgcgatgaacatggttttacccgggagcactacaatcagctgaagaagttcagcccggagacattacgtgaaattattgctgaaatagccagctgtcatccatcaaccagtgtattgctcaggaataagtggctgacaccgccggaggatattctggagcagattacccgtgaatacgaacgaagaatacaaaactgtccatcgttcaggagcgagaaggaagcggaatcctggttaaatgaactgtcttttgctgtgattgctccgctataccgtgttgtccccgaacaaacagaacaggttgagtcctttgttctgcagcttattgccgagcaggagcgggtttgggagcttattttaaccaatgatggttattcatggcattgcgcactttatgatatattatttcatctggttttacgaaatatggaagaccagcctgaacatcagagacagcgaataacaaaaatacttaatgagtccgatacaagacgggtggcagaagagattaaattccggattcaatatcttcaggatgaagaacaaaagagagttttaagtgatctggtaaatgtcctgatttcaaaaaga

SEQ ID NO: 1240 - protein, 214 aa, Escherichia coli
MMKKDMADSVSMTWQLLCDEHGFTREHYNQLKKFSPETLREIIAEIASCHPSTSVLLRNKWLTPPEDILEQITREYERRIQNCPSFRSEKEAESWLNELSFAVIAPLYRVVPEQTEQVESFVLQLIAEQERVWELILTNDGYSWHCALYDILFHLVLRNMEDQPEHQRQRITKILNESDTRRVAEEIKFRIQYLQDEEQKRVLSDLVNVLISKR

SEQ ID NO: 1241 - DNA, 468 bp, Escherichia coli
ctgaatcatctgcgcagggtacttcatgaagtcagcccttttgcacaggagcctgtggactgtgtgctgtgggtgaaagcagatgaggtggtggccaacgattataaccccaatgtcatggcgccgggtgagaagaaactgctgaagcagtcactggagaaaagatggtttcacccaacccgtgtggtggtgtcggcggagaagaacccctatctggtggtggatggttttcatcgtcagttactgggcagggaagcaggtacaggaaaacgcctgaaaggctggttgccagtggcctgtattaatccggaaagaaagggacaggccacacgtatggcggccaccatacggcataaccgggccaggggtaaacaccagataacctcaatgtctgatattgtcagggacctgtcacgcctgggctggacggatgaacgcattggtacagagcctggggatggaccagga

SEQ ID NO: 1242 - protein, 156 aa, Escherichia coli
LNHLRRVLHEVSPFAQEPVDCVLWVKADEVVANDYNPNVMAPGEKKLLKQSLEKRWFHPTRVVVSAEKNPYLVVDGFHRQLLGREAGTGKRLKGWLPVACINPERKGQATRMAATIRHNRARGKHQITSMSDIVRDLSRLGWTDERIGTEPGDGPG

SEQ ID NO: 1243 - DNA, 651 bp, Escherichia coli
gtggcgaatatgaatggtaaatataatgtcaggagtgaattgttagctcgttgtatcggaacaggtagattgaaaggagatgtggtaagtgattttattgggtttaatggtagcaaacagataggttatgttttattaactttatttttaataaaagtaataaatcctgatttgctctctcattatcgtatatttaatcgttttttgcgttatgagagaaaagttatggatatatataattctttgagtgatatagaagttgattgtatttgccgggaagtgatggctatatatgaacatactcagcgatgctgcaacgaaaagaaaattacaactgtccagttaggcaggaaacttaatggcaggtatgcagatatgattgctgagttaaaagaaacagcagagatgaggggggagggggtaatttcttttgagatggatatattgaattcttttaatgatgcgaatgaatatcacggacgtgttaaactggaattggatatacctgcttcagatatattatattgccatgattttattgattcagaacatgtaaactcctggctggttgaaccacatgagtgggtggttattaatcgttctcttactgggattgttacagtgccagtatcagcaataaaaatctcttat

SEQ ID NO: 1244 - protein, 217 aa, Escherichia coli
VANMNGKYNVRSELLARCIGTGRLKGDVVSDFIGFNGSKQIGYVLLTLFLIKVINPDLLSHYRIFNRFLRYERKVMDIYNSLSDIEVDCICREVMAIYEHTQRCCNEKKITTVQLGRKLNGRYADMIAELKETAEMRGEGVISFEMDILNSFNDANEYHGRVKLELDIPASDILYCHDFIDSEHVNSWLVEPHEWVVINRSLTGIVTVPVSAIKISY

SEQ ID NO: 1245 - DNA, 1350 bp, Escherichia coli
tgtattatgctgcaagtctcttaacccaagtctctcttttggagaatggtagaacttggcttgattcatggaagagtaaggagagttgttgcatttgatcaccaattgcttcgctgtctataacaacaaatctgttgttatactcctcacttgaagctttaagatcaattagtttcccaagcaatgagtaagcactattccagcttcctccgtgtttcacgcttgatgtaaaaacgtatttaggtatgtcggtttttattgttacagggacggtaatttgatgtccactcaagccatatacgttttcacgaagagaaagtgcgtctctaagctctgtgtgatatagataatcaataaccatactttcaaacttttcagcttgaactggctgataccagtctaacgacaaagttgatgcgagtataccagctctaattatgttcgatgtaatcgcaccgacatccttttctgttgcccaagcaatgatttctcctcgagcattgagttctgcgccttctttaagcagtaattgtcgtatctcatcaagtcgttttttggtaagcgagatccctcttgcctccatattcattaaggcatcgcatctgtcactaactaaatacctaccattgacttcacggataaaggcaccgacatgctctccatcatcacagtaagtgaatggactgataattctcaaggtcttgcctattggatggcattcgaaacctagttgtgagatcactgttgagcacatcatattccaaaccccatttgccccgactcatcttcaagcggtaaaggtattctcccagagtaagttatgttcagatgtttacagaagtaattccaataccctaccaggtcatctgggtttatgtcatcttcgattggaaacgctattctatcactatagtatccagcttcttcatagtatacatggtagtgagcaccgtaaatgatatcttggtacttcggatgatcgaccttgtaactattcgtgtgtttgtcaaagtgataggtatctaccgcgaaaaccctcttgttatgatagaaagcaataatatttattttagggtaagaaatcgggtcatcaggttctgaatcctgatctggtttccatttcagttcaaactttagcccttgtataggtatacaatcctcatccaaggggatgatatgggcttgtagccacatatcagagcgacttggtttctgtttccatttaacgccagaaaagttaactatttttttacaataaagtactttatcaacttctacttggcttggctgataatcatctatttttgccaatgtttaccgccctgtaaattgtagataaaagtggtttca

SEQ ID NO: 1246 - DNA, 750 bp, Escherichia coli
atgatgtgctcaacagtgatctcacaactaggtttcgaatgccatccaataggcaagaccttgagaattatcagtccattcacttactgtgatgatggagagcatgtcggtgcctttatccgtgaagtcaatggtaggtatttagttagtgacagatgcgatgccttaatgaatatggaggcaagagggatctcgcttaccaaaaaacgacttgatgagatacgacaattactgcttaaagaaggcgcagaactcaatgctcgaggagaaatcattgcttgggcaacagaaaaggatgtcggtgcgattacatcgaacataattagagctggtatactcgcatcaactttgtcgttagactggtatcagccagttcaagctgaaaagtttgaaagtatggttattgattatctatatcacacagagcttagagacgcactttctcttcgtgaaaacgtatatggcttgagtggacatcaaattaccgtccctgtaacaataaaaaccgacatacctaaatacgtttttacatcaagcgtgaaacacggaggaagctggaatagtgcttactcattgcttgggaaactaattgatcttaaagcttcaagtgaggagtataacaacagatttgttgttatagacagcgaagcaattggtgatcaaatgcaacaactctccttactcttccatgaatcaagccaagttctaccattctccaaaagagagacttgggttaagagacttgcagca

SEQ ID NO: 1247 - protein, 250 aa, Escherichia coli
MMCSTVISQLGFECHPIGKTLRIISPFTYCDDGEHVGAFIREVNGRYLVSDRCDALMNMEARGISLTKKRLDEIRQLLLKEGAELNARGEIIAWATEKDVGAITSNIIRAGILASTLSLDWYQPVQAEKFESMVIDYLYHTELRDALSLRENVYGLSGHQITVPVTIKTDIPKYVFTSSVKHGGSWNSAYSLLGKLIDLKASSEEYNNRFVVIDSEAIGDQMQQLSLLFHESSQVLPFSKRETWVKRLAA

SEQ ID NO: 1248 - DNA, 555 bp, Escherichia coli
ttggcaaaaatagatgattatcagccaagccaagtagaagttgataaagtactttattgtaaaaaaatagttaacttttctggcgttaaatggaaacagaaaccaagtcgctctgatatgtggctacaagcccatatcatccccttggatgaggattgtatacctatacaagggctaaagtttgaactgaaatggaaaccagatcaggattcagaacctgatgacccgatttcttaccctaaaataaatattattgctttctatcataacaagagggttttcgcggtagatacctatcactttgacaaacacacgaatagttacaaggtcgatcatccgaagtaccaagatatcatttacggtgctcactaccatgtatactatgaagaagctggatactatagtgatagaatagcgtttccaatcgaagatgacataaacccagatgacctggtagggtattggaattacttctgtaaacatctgaacataacttactctgggagaatacctttaccgcttgaagatgagtcggggcaaatggggtttggaata

SEQ ID NO: 1249 - protein, 185 aa, Escherichia coli
LAKIDDYQPSQVEVDKVLYCKKIVNFSGVKWKQKPSRSDMWLQAHIIPLDEDCIPIQGLKFELKWKPDQDSEPDDPISYPKINIIAFYHNKRVFAVDTYHFDKHTNSYKVDHPKYQDIIYGAHYHVYYEEAGYYSDRIAFPIEDDINPDDLVGYWNYFCKHLNITYSGRIPLPLEDESGQMGFGI

SEQ ID NO: 1250 - DNA, 11475 bp, Escherichia coli
ctacaacctcttgttgttatcaatcctcatagagtgtgacagaaatatgacatttttccgggaacggtttcgcaaaacgggagattccagaagataaccggcaggtcagcgtgttccggttactccgagataaaaacctcatacttaatattgcgggcgcaataaaaagtgccgtccgtcagatacagttcacgaaatcgcgtgttatcagagatgttgtccagcagggaacgttccgtatcgacaaattctttttgcacgcggtaatgaacggcgttctccgtttcaaaagagacatattccgtggtggcgtagggcttattttttgatttcacgtacacgatatattgcacggtactggccgtcagccccgttttcgccgcgatctctttgagactcaacgtctcagaggcataaagcgcctgaacctgcgctatgcgtcggtgattatacgccgtcacccgaaggctcagtttcagccgataggccatattccgcacggcggtaatattagtgtgaagcagttgcgctatctgctctgtcgtgaggatgcccgcgttttcccgcagaatcgcaaggctttcgtcgttccagataaatgccattgggtatctctccgtacgcgtcgttcatcgcgccgccaggcgcgcaaacgtggcctctaactcagacggcttacgcataccctggtgtagctccagaacgcgtccttcggagtcaatcagtacggaggtcggcgtgccgatcacctgataacgttcctgggtaatgttgagctgatcgcgcaccaccggataggttatctgatgttttgccagcagatcgttgatcctgaccgtttcagggtcggtattgaccgccacaaccaccactttatcgccccattttttgctcagcgcttccagcgtgtccatttccgctaggcaccccccgcatcccgcagaccaaaaattcaggtacaccgcctttccttgccagcgttcaaggcctgactcctggccttgcagatcaaacgccgccagcgccggggccggtgccccgaccgccagcttttcttctttacacccgcttatcaggatcgccgccgcgagtaacagcacattatgccagcgcatgttgattggcctcctcacccagatatttaccgtgttgcagccgcagaatacggtcggcaaactgcccaagcgcagggttgtgcgtcaccatcacaatcgtgcgcccctgacgatgcagatcggtgagcagatccagcacccgctgctcattctcttcatccaggttgcccgtcggttcatccgcgaaaataaccggcggttcgttgaccagcgcccgggcgatacacacacgctgctgctcaccaccggaaagctggctcggcaggtgcgtcacacgatgcccaagccctacctgttccagcaccttcctcgccgccgcttcatccaccacgctgtggtaatgctgggcgagcatgatgttttccagcgcagttaagaacgggatcaaatggaactgctgaaataccaggccgattttctcggcgcgaaagcgacggcgcccctcttcatccagcgcggcggcatcggtgccatcaagaaacacctgcccttccgtcgccgtatcaaggcacgtcagaatattcatcagcgtggttttaccagaaccagaagcgcccataatggcgacaaattcaccctgcgcaatgcgcagattaatgtcatccagggcggtaacgtcaccgaaccgtttgtataagtggcgggtttcgatcgccacctgagggatatgcgtaacggacatggcgctactctcctttcagcactttagcaggctcgacgcttaccgcgcgtcgcaccggaacaatcgccgccagaatggcgaccagtaaagacaacaccagagtaatgggcaacaccggcagacgcagtgaaatggcggcattaaacaccgttaatcccaacagttgcgccagcaaatatcccagcacccagccgcacgccaccgccgccagcgcgatgatgctggtttccagcagaatttgccgcacgatatcgccgttgctggaaccaagcgctttttgcagcgcaaactcgcgcgcccgctcgccgacaatcgccatcagcgtggtattcacgcacagcgaagagagcgccagaatcacgatcgagaccagtcccatcagacctttaattttatccagcacctgcccttcggaagcagagaccttacgcaccggacgaatctccaggtcaggatactgcgcctgcaaccggctggcatagttctccacctggccgacatcgttactgacgctcagcaagccgtggctgattttgcccggctgatgcagccaggcctgcgccacgtcgaggctgacgatcagcatgttgtccgtcgcatcgccagactccacaatgcctttaatctgcaaattcttacgctgattgtgatccaccagcgtgatgctgtcgcccggctgcacgttgaggcgttccgccagtttgacgccgatcatcgcattacggtcgtcaaaactaacgccaatccagctaccggtgacctgccagtacggcaccagtttttgcagcgactcgaaccacacgccaaccatcaccactttttccagctcggtacgcgccatgccgtacaaccacggactggcgccatgcaccagcccctgcggcgcctgatcgagaatgctctgcaactcctgctgcggcatactggaaccgtgccccggcccgatgtaaaaattcgcgccgaaggtgcgcagttcttcgctcattttggtgttaatgtcgaaccagacggcaaaaagcgccgtcacgatggtcgcccccaccatcagcgcggcaaacaccacgctgacccgctgaaaacgcagacgcagcgcccgccacaccagcagccagagcatggtacgtttagcggccatacagcacctccacaggatacagccgggcaatccgccgggccgggaaccaggtgccgatcaacgcaatcagtaccgcaatcaccagtacgcacggcaccacaatccaggcaaaattaagcggcgcgtcgaagagcatgacgccaatcgctttcgccagcccccacccggcaatacatcccagcgcaccgccagccagcccgctggacgccgcttccaggtagaacagcagcataatttgccactgtcgcgcacccagcgctttcatcaaaccgatctctttggcgcgttccataatggtgctggtcatcagcgaggcgatccccattgcggaagccaccagcgccgcgacggtaacgaccgccatcagcaactgaattttatcgatcaccaccccttcggacgccgcgacctgccataccgggcgcacttccgcaccggaaatcgcctcttccagctgatgcgcgatcgacgacacataggccgtgcaataccagaggtcgtactcttcggcattgagcgcgtccaggttttcccgcgcgcggcgggacagttcgttttccggcaccgtcagcgccgagacgcgaatcgcctgcacttttccggggagccccagcaggtgctgtaccgtgcttagcggcatcaccagttggttatcttcatcgccgccgctggagaggataccgctgacggtgacctgcactgcttcgccttcggtacgtaatgtcagcttatcaccgggtttccagcccatttgccgcgccagcgcgtgcccgactaaggtctgcggctctgcgcctgcgggttcctgcggccagtcgccggtcacctgccagtatgggctgaccgttttctgccccgtctcatatccctcttcatcaggaatatccactggctgactgaagaaagtgcccagaatccgcactggttctccctccacgctggcttcgccgccgagcatcggcgcaaacccgacaatgttgtttcgccagaagatatctttgatgttcggcagctcggcttcatcaagaaaatcctgaccggaaagcggattactgctctcactaaacagcgcgggcagcgcagcctgtccggcgggttcaatcaaaatgttcgcaccataagacttcagctctctggacattttgtcgccgatatcaatggacaccgccagcagcgccgagatcaggctggaggccagaaaaacggtgattatcgccagcactttgcggcgtaaattgcgcccccaggattgtcgtaacatccgccacagcatgattattcctccctcatgtcggcaggaacaaactgctccggcgtttcacggaagcgttcatagttagcctctgacgagaagaaccaggtcttgccgccatagctgtatttgtaatcggctgaggtattggtcaacgttgaaccatcgaccggatcggtcactttaatagtcatgaccgtcgagaagtagttcacccctgtcgccagttctttaccggggatcaccagctctttttcatcattgtgccagttttcaatcggcaccgggttacagccaccggccttgccgatagacggaataaaaatatgcactccgcaggcgacgcagataacctgattgccctccatgacataaccctgatcgccgcacagcaggcaggcgtcgaacaccacgccaaaacgcagcttgtcgggatagcggttaatcacgaagaagcgcaccgctttgccatcgtccgccacccagacgaaacgatgcagtttaccgtcacgaagctgttcaaccggcaggcgcaccatgccatcgctccccagcgttacgggcacggcttcagagagttgcggcggctgcgaggccactttatcccaccacagttggcctgcgataacgaccaccgcgcagccgattgtgaccaaccacagccgcaaagcgttgcgacgctgcgccagcgccagacggtgagcaatcggttcttcggtttcccgcgtctgtcgaaaagcccgcaacagcgccggaagccagcacagcgccagggccagcagcagcgcggctcccgcccagttatacagcgccgtgttatttgtgactttcgccacgaagctcagcagtgattttcccagcggaacaacctgtaatttcatcagcaacaacagcaggttgccgctcagcggcagccagatcatcaccagcagaatcagcgttaacggccagtacaggccgcgaatacgccgcagcagcatcgcgcagagtacgcccgccagacagaggatcgcaaaagcgagaacgacggccgtcaggtttaacagcaggtcagtattcagcacatgcgtactggtcagcccgcccagattagggtccagcgcccaatggcgggcagcgccgaaaatcagaatcccctgccacagatagcggatacgcgttgaagcccaccagaaactgaggacaaacagcagcgataccatgacctccgccccaaccagcagcagttgtaccggttggctgccgtgaataaacagtcccgccagcacgccggcaatcagcccggtcagcagcgtccaggtcagcggacgtaaagagggaggatcgtttcgactccagagaacaccggaaagaagcgcaatgcagaaaaagacctgtagcgtcgtgacgaaaaagtaactcataacttcgactctgtacggcgggttgaattaagcgacgggcatatgatcggtctgaccaacgcgccagaagggggaatcctcctggcgcgttggttagtcggttttagttcagaccgacatatttaaactcgtagctcacatcaaacggtttccaccagcggcctacgcctgtttcgctgtcagtatggcgatgcatcccggcttttgacggcggttcaatgtggtaggtcactttatagttgcccacgcccatcattttgatgttcgcgccatagtgcgggccatcgctggcaaccatcggcatgaaggtgccttcctgtttttcgcccgtgtcgttgttgaccagggtgtagctgatggtcaggtacgggatccattcccctgcgccaaagccgtttttattgccttctacagcgtggatatccgcttcaaggtgaacatcggcttttgctgccggtaagcccatgccgcgcggttccatatcaatcggttgcaggtaaacggccgccagctccatttcattcatggtgacaggctcgcctgccgggtactctttaaaagcaaacgcggctggcgcaatgaaaatgctggccatcactgcgctggcaatcagggttttcttcatggtcatcaaacgtatcctctcgtctaaaacaacggctatacaacgattatgggttattttttatcgtctccccgggaaccgcgcttttgcgccgcatcacccacagcgccaccagcgccgcgagcagcaatacaacctgcggtaacaacgtttccacgtagggataaatccccagccagctgatttcagggaagccgttaatcaacgtaggctggaacagtttgccttccaccagttccagaacgcctttgcccgcaaagacgaaggccatcagatacatgaaactgccggtaaacataaagaagggtttcagcggcaggcgcaccactgagtaacgcatcaccagccaggcgagcagcagcaccacgcagccaatcacaaaaccggcgccaatcgccatatggccggataccgtgtttgcatcgccaatcagagcgtaatagaacagcaccgtttccgccccttcgcggtacaccgccaggaagctggtcagccatagtccgaccagggagcctcgcgacagggaatgagacagtttgccttccagccaggctttccagtggcgcgcttccactttggacagcagccagtaactcataaagaacagcatcacgacggcaatcagcatcgttatgccttccagcagttcacggctggcgccggagttagtaaacagcatctggaagatagcggcggtgatgacgctggcgatcagcgccacaattaccgactgacgaataagcggcagcttatcctgatggttgtttttcaccatgtaggccacgattgccgcaacaatcagcagcgcttccagcccctcgcgcacgatgatcatcagactatagagcagcagactccactgggtttcttcgccttcgcccagcatcgtcacggctttttgcagatcctgcgccagcgcgctggcctctgcattcaggcgctcaaccggctgaccggccttcatcagactgaccaggcgggtaaaatacgcctccagcgtggttttaaatgccgaatcgcgagagccgattttgttttccatgccgctggcttcgaagcggtcgaagtaggtatcctggatatccagaatcgcattcttcgcatcgccgccctgatagcgcgctatcgcgtcctgaatgctctggttaattcccgtcgtcacctcagcccagtcggtgcggttatttccctcgtccgccgccggaatgttgtctgcgctttgcgctgcggcaacctgctgatcgtcacgggtggttggcaagccgggtaagatatcctcgatatcctgtagcagcgtagtgacctgataggagacatcgttgagatggtcaggttgcgcggtcagcgcaatcagggatgagaattgttggttaatggaggcggcatcttttgcagaacggttttgtctgagggacatctccatctcagagtttttaaagccctgatagtgcgcctgttgaacgtgctgactggcaacgctgtaattcccggcctgatattcagtgaccgcctgcgccagcagatcgtcgatcgtcctgaaactctcctgccagtgaacggcaatgtcgtccctggacagcgcgttgtgctgctcttcggccaccagacgatgtccgccatccagcaccggttccacttcgcgcagtgcggctttcagccagtcaatgcgcgcctggacgtcagcgagcggttttttctcgccaatcattcgacggatctcgccgaatgcgctctccatctcgtaacttttgcgcgcggaaatgttgatgcggatcggcccttccaggttctcgaacacctcaaaataggccatttgtaccgtgcggcgcgcctcgtcggcatgctgttgctgataaagttccgctgttttatcaagacgttgctcgatatcttcaatcaaaggcgcataattcgtcgacgcccagacactcatgcttataaacaagccaaagagagtaaccaacaaagagttacggaagttacgcacgtgcacaccgccaaagaatacaaatgataattattatcatatctttttgtcgcgttgtacatgacctggatcataaaaatgtcagcagacgacaagttatgtaaatttatttcatcaaatcgtgatgaacacacacattatgcgttgataaaagggacgttatctccctgtttttctcatggaattaacggcaaggcaggcgcggtaacagaggaataaatccccctgccgacagtgatattattcattatcggcaggcagaaataaaacgcgttattgcgtacagcaatattcaaagattaaggttatttcgatcgctggcaagacgctgtaagaattgaccatatccctgcggccccatccagtagttaatacttttctcaacgccggttgatgtcaacgtcgcaccggaaataccgtcaacggtatattcatcggcatgttcaggtttatcctgtactattttcaatgcaggatgtccgctgttatctaataatcgtttccctggccactgtttgcgccagttggcgtcttccaccctagcccccagaaacggcgtttcccgttgctgataataatacagatttctcaccgtacgaccgtccagccccagagcaagaaacgcatgcatcatggatttcgcgcccttaccggtaactggaatgataacctgctgaatttcattatttttatctttcacaaagaacacatccgccaccgtacagcgctgacgaacctgcgctgggtcgcgttcaggggcaagtttttcacacttctgccgcgcggtgtccgcgctgctgccagccaccagttcgccggaatctaaattaacatggcgttgaataatataacgatgatagagcgtttcgactgattttttatcctgggtctctgatttcatcaggcccgcagcgtgtaaaattgccgcctgtttttcctcctctgtcggctccgtcatttctccctggaacagcataaaccatgccgccgccgcaacaaaaataaggacacaaagcaccatcattgatgcaacaataattttacccttgcgcattgaattgttatccctgtcaaaatggaaatcgaaaaaatcgcttgaacgtatcacagactttcattcaattaaaacagatatgccattatcaattcaggtttgcaacgtcaggcagcggtaaaaaataataactggcgtcggtaaaaaagcagcaaaaataacagaaaacacgctctccgctcgttttacacatccttacaatgggttaaaaaatgccgggtttccccggcacgctatcaaaacatggctgcccgccacagacgtaacttcatgccccagtagctggtccagccgctggtcgtagttaccacctgccccttcgacaccaccaccagcgttggcgtgacgctgatttcccagtttcgtgatatctcaccgccgctatcattcacgacagggaacgtcacccttttacgcgataaccagcgggaaacctccccgtcattaccggaacgcagcgcgatggtcatgacgctctccccttccgactgcaaacgggcgacatccggcgtggtgaaacggcagataccgcaccagctcgcccagaagtagagcagcaccgggcgttcttcactgatcgacgccagcgttacggtttccccgtccagcgtatgcagcggcgtgctgtcaaacatggccggcatctgcggagaacgccagacatccagcaggattatcacgccagccagcagaaccagtaagatcgcgccttcacgcagccagcggcgcagtttactgagcatgggccaccgccagtttttctttcaccaccgcctcaagggtctcccacgataccgcgccggggatcatctcgtcgccaatgatggttgccggcgtcccctgaacgccaaccagccgggcgagttgcagattggtgctcaacgtctccatgcttttctcatcggggtcagtttggatatagagaattattgtactaggcactgttgcaaagttagcgatgaggcagccttttgtcttattcaaaggccttacatttcaaaaactctgcttaccaggcgcatttcgcccaggggatcaccataataaaatgctgaggcctggcctttgcgtagtgcacccatcacctcaatacctttgatggtggcgtaagccgtcttcatggatttaaatcccagcgtggcgccgattatccgtttcagtttgccatgatcgcattcaatcacgttgttccggtacttaatctgtcggtgttcaacgtcagacgggcaccggccttcgcgtttgagcagagcaagcgcgcgaccataggcgggcgctttatccgtgttgatgaatcgcgggatctgccacttcttcacgttgttgaggattttacccagaaacaggtatgcagctttgctgttacgacgggaggagagataaaaatcgacagtgcggccccggctgtcgacggcccggtacagatacgcccagcggccattgaccttcacgtaggtttcatccatgtgccacgggcaaagatcggaagggttacgccagtaccagcgcagccgtttttccatttcaggcgcataacgctgaacccaccggtaaatcgtggagtgatcgacattcactccgcgttcagccagcatctcctgcagctcacggtaactgatgccgtatttgcagtaccagcgtacggcccccagaatgatgtcacgctgaaaatgccggcctttgaatgggttcatgtgcagctccatcagcaaaaagggatgataagtttatcaccaccgactattgcaaacagcgcctaaaaaacagcctgtttcggtataaaaatcgaccatacagagagagaaaccaccggagtggtgggaaaagcagaaaggttcacgtggcataaggcgtggacaatggtatcgattgttttttcaatttcctatacgtccaggatatgccgcgccagcggcatggaaggcggcgctctgttgtttcatatgataccggagtaaaaccgccgaagcccggcgtaagccggtactgattgatagatttcgcctatcccattcccaccctgctaagccatacccgctttcagccatgagagagcttctgtgcgcggtcggagtggtcccgacgagggtttacccgaagtcggggcgtatctccgcgttagcgggccgtcagggccgcttacgagcgtgtactgaggacttccagccagaacactgacagcgatgacggagtatagttacaacattcataattaaaagcga

SEQ ID NO: 1251 - DNA, 483 bp, Escherichia coli
atggcatttatctggaacgacgaaagccttgcgattctgcgggaaaacgcgggcatcctcacgacagagcagatagcgcaactgcttcacactaatattaccgccgtgcggaatatggcctatcggctgaaactgagccttcgggtgacggcgtataatcaccgacgcatagcgcaggttcaggcgctttatgcctctgagacgttgagtctcaaagagatcgcggcgaaaacggggctgacggccagtaccgtgcaatatatcgtgtacgtgaaatcaaaaaataagccctacgccaccacggaatatgtctcttttgaaacggagaacgccgttcattaccgcgtgcaaaaagaatttgtcgatacggaacgttccctgctggacaacatctctgataacacgcgatttcgtgaactgtatctgacggacggcactttttattgcgcccgcaatattaagtatgaggtttttatctcggag

SEQ ID NO: 1252 - protein, 161 aa, Escherichia coli
MAFIWNDESLAILRENAGILTTEQIAQLLHTNITAVRNMAYRLKLSLRVTAYNHRRIAQVQALYASETLSLKEIAAKTGLTASTVQYIVYVKSKNKPYATTEYVSFETENAVHYRVQKEFVDTERSLLDNISDNTRFRELYLTDGTFYCARNIKYEVFISE

SEQ ID NO: 1253 - DNA, 483 bp, Escherichia coli
atgcgctggcataatgtgctgttactcgcggcggcgatcctgataagcgggtgtaaagaagaaaagctggcggtcggggcaccggccccggcgctggcggcgtttgatctgcaaggccaggagtcaggccttgaacgctggcaaggaaaggcggtgtacctgaatttttggtctgcgggatgcggggggtgcctagcggaaatggacacgctggaagcgctgagcaaaaaatggggcgataaagtggtggttgtggcggtcaataccgaccctgaaacggtcaggatcaacgatctgctggcaaaacatcagataacctatccggtggtgcgcgatcagctcaacattacccaggaacgttatcaggtgatcggcacgccgacctccgtactgattgactccgaaggacgcgttctggagctacaccagggtatgcgtaagccgtctgagttagaggccacgtttgcgcgcctggcggcgcga

SEQ ID NO: 1254 - protein, 161 aa, Escherichia coli
MRWHNVLLLAAAILISGCKEEKLAVGAPAPALAAFDLQGQESGLERWQGKAVYLNFWSAGCGGCLAEMDTLEALSKKWGDKVVVVAVNTDPETVRINDLLAKHQITYPVVRDQLNITQERYQVIGTPTSVLIDSEGRVLELHQGMRKPSELEATFARLAAR

SEQ ID NO: 1255 - DNA, 693 bp, Escherichia coli
atgtccgttacgcatatccctcaggtggcgatcgaaacccgccacttatacaaacggttcggtgacgttaccgccctggatgacattaatctgcgcattgcgcagggtgaatttgtcgccattatgggcgcttctggttctggtaaaaccacgctgatgaatattctgacgtgccttgatacggcgacggaagggcaggtgtttcttgatggcaccgatgccgccgcgctggatgaagaggggcgccgtcgctttcgcgccgagaaaatcggcctggtatttcagcagttccatttgatcccgttcttaactgcgctggaaaacatcatgctcgcccagcattaccacagcgtggtggatgaagcggcggcgaggaaggtgctggaacaggtagggcttgggcatcgtgtgacgcacctgccgagccagctttccggtggtgagcagcagcgtgtgtgtatcgcccgggcgctggtcaacgaaccgccggttattttcgcggatgaaccgacgggcaacctggatgaagagaatgagcagcgggtgctggatctgctcaccgatctgcatcgtcaggggcgcacgattgtgatggtgacgcacaaccctgcgcttgggcagtttgccgaccgtattctgcggctgcaacacggtaaatatctgggtgaggaggccaatcaacatgcgctggca

SEQ ID NO: 1256 - protein, 231 aa, Escherichia coli
MSVTHIPQVAIETRHLYKRFGDVTALDDINLRIAQGEFVAIMGASGSGKTTLMNILTCLDTATEGQVFLDGTDAAALDEEGRRRFRAEKIGLVFQQFHLIPFLTALENIMLAQHYHSVVDEAAARKVLEQVGLGHRVTHLPSQLSGGEQQRVCIARALVNEPPVIFADEPTGNLDEENEQRVLDLLTDLHRQGRTIVMVTHNPALGQFADRILRLQHGKYLGEEANQHALA

SEQ ID NO: 1257 - DNA, 1128 bp, Escherichia coli
atggccgctaaacgtaccatgctctggctgctggtgtggcgggcgctgcgtctgcgttttcagcgggtcagcgtggtgtttgccgcgctgatggtgggggcgaccatcgtgacggcgctttttgccgtctggttcgacattaacaccaaaatgagcgaagaactgcgcaccttcggcgcgaatttttacatcgggccggggcacggttccagtatgccgcagcaggagttgcagagcattctcgatcaggcgccgcaggggctggtgcatggcgccagtccgtggttgtacggcatggcgcgtaccgagctggaaaaagtggtgatggttggcgtgtggttcgagtcgctgcaaaaactggtgccgtactggcaggtcaccggtagctggattggcgttagttttgacgaccgtaatgcgatgatcggcgtcaaactggcggaacgcctcaacgtgcagccgggcgacagcatcacgctggtggatcacaatcagcgtaagaatttgcagattaaaggcattgtggagtctggcgatgcgacggacaacatgctgatcgtcagcctcgacgtggcgcaggcctggctgcatcagccgggcaaaatcagccacggcttgctgagcgtcagtaacgatgtcggccaggtggagaactatgccagccggttgcaggcgcagtatcctgacctggagattcgtccggtgcgtaaggtctctgcttccgaagggcaggtgctggataaaattaaaggtctgatgggactggtctcgatcgtgattctggcgctctcttcgctgtgcgtgaataccacgctgatggcgattgtcggcgagcgggcgcgcgagtttgcgctgcaaaaagcgcttggttccagcaacggcgatatcgtgcggcaaattctgctggaaaccagcatcatcgcgctggcggcggtggcgtgcggctgggtgctgggatatttgctggcgcaactgttgggattaacggtgtttaatgccgccatttcactgcgtctgccggtgttgcccattactctggtgttgtctttactggtcgccattctggcggcgattgttccggtgcgacgcgcggtaagcgtcgagcctgctaaagtgctgaaaggagag

SEQ ID NO: 1258 - protein, 376 aa, Escherichia coli
MAAKRTMLWLLVWRALRLRFQRVSVVFAALMVGATIVTALFAVWFDINTKMSEELRTFGANFYIGPGHGSSMPQQELQSILDQAPQGLVHGASPWLYGMARTELEKVVMVGVWFESLQKLVPYWQVTGSWIGVSFDDRNAMIGVKLAERLNVQPGDSITLVDHNQRKNLQIKGIVESGDATDNMLIVSLDVAQAWLHQPGKISHGLLSVSNDVGQVENYASRLQAQYPDLEIRPVRKVSASEGQVLDKIKGLMGLVSIVILALSSLCVNTTLMAIVGERAREFALQKALGSSNGDIVRQILLETSIIALAAVACGWVLGYLLAQLLGLTVFNAAISLRLPVLPITLVLSLLVAILAAIVPVRRAVSVEPAKVLKGE

SEQ ID NO: 1259 - DNA, 1281 bp, Escherichia coli
atgctgtggcggatgttacgacaatcctgggggcgcaatttacgccgcaaagtgctggcgataatcaccgtttttctggcctccagcctgatctcggcgctgctggcggtgtccattgatatcggcgacaaaatgtccagagagctgaagtcttatggtgcgaacattttgattgaacccgccggacaggctgcgctgcccgcgctgtttagtgagagcagtaatccgctttccggtcaggattttcttgatgaagccgagctgccgaacatcaaagatatcttctggcgaaacaacattgtcgggtttgcgccgatgctcggcggcgaagccagcgtggagggagaaccagtgcggattctgggcactttcttcagtcagccagtggatattcctgatgaagagggatatgagacggggcagaaaacggtcagcccatactggcaggtgaccggcgactggccgcaggaacccgcaggcgcagagccgcagaccttagtcgggcacgcgctggcgcggcaaatgggctggaaacccggtgataagctgacattacgtaccgaaggcgaagcagtgcaggtcaccgtcagcggtatcctctccagcggcggcgatgaagataaccaactggtgatgccgctaagcacggtacagcacctgctggggctccccggaaaagtgcaggcgattcgcgtctcggcgctgacggtgccggaaaacgaactgtcccgccgcgcgcgggaaaacctggacgcgctcaatgccgaagagtacgacctctggtattgcacggcctatgtgtcgtcgatcgcgcatcagctggaagaggcgatttccggtgcggaagtgcgcccggtatggcaggtcgcggcgtccgaaggggtggtgatcgataaaattcagttgctgatggcggtcgttaccgtcgcggcgctggtggcttccgcaatggggatcgcctcgctgatgaccagcaccattatggaacgcgccaaagagatcggtttgatgaaagcgctgggtgcgcgacagtggcaaattatgctgctgttctacctggaagcggcgtccagcgggctggctggcggtgcgctgggatgtattgccgggtgggggctggcgaaagcgattggcgtcatgctcttcgacgcgccgcttaattttgcctggattgtggtgccgtgcgtactggtgattgcggtactgattgcgttgatcggcacctggttcccggcccggcggattgcccggctgtatcctgtggaggtgctgtatggccgc

SEQ ID NO: 1260 - protein, 427 aa, Escherichia coli
MLWRMLRQSWGRNLRRKVLAIITVFLASSLISALLAVSIDIGDKMSRELKSYGANILIEPAGQAALPALFSESSNPLSGQDFLDEAELPNIKDIFWRNNIVGFAPMLGGEASVEGEPVRILGTFFSQPVDIPDEEGYETGQKTVSPYWQVTGDWPQEPAGAEPQTLVGHALARQMGWKPGDKLTLRTEGEAVQVTVSGILSSGGDEDNQLVMPLSTVQHLLGLPGKVQAIRVSALTVPENELSRRARENLDALNAEEYDLWYCTAYVSSIAHQLEEAISGAEVRPVWQVAASEGVVIDKIQLLMAVVTVAALVASAMGIASLMTSTIMERAKEIGLMKALGARQWQIMLLFYLEAASSGLAGGALGCIAGWGLAKAIGVMLFDAPLNFAWIVVPCVLVIAVLIALIGTWFPARRIARLYPVEVLYGR

SEQ ID NO: 1261 - DNA, 1377 bp, Escherichia coli
atgagttactttttcgtcacgacgctacaggtctttttctgcattgcgcttctttccggtgttctctggagtcgaaacgatcctccctctttacgtccgctgacctggacgctgctgaccgggctgattgccggcgtgctggcgggactgtttattcacggcagccaaccggtacaactgctgctggttggggcggaggtcatggtatcgctgctgtttgtcctcagtttctggtgggcttcaacgcgtatccgctatctgtggcaggggattctgattttcggcgctgcccgccattgggcgctggaccctaatctgggcgggctgaccagtacgcatgtgctgaatactgacctgctgttaaacctgacggccgtcgttctcgcttttgcgatcctctgtctggcgggcgtactctgcgcgatgctgctgcggcgtattcgcggcctgtactggccgttaacgctgattctgctggtgatgatctggctgccgctgagcggcaacctgctgttgttgctgatgaaattacaggttgttccgctgggaaaatcactgctgagcttcgtggcgaaagtcacaaataacacggcgctgtataactgggcgggagccgcgctgctgctggccctggcgctgtgctggcttccggcgctgttgcgggcttttcgacagacgcgggaaaccgaagaaccgattgctcaccgtctggcgctggcgcagcgtcgcaacgctttgcggctgtggttggtcacaatcggctgcgcggtggtcgttatcgcaggccaactgtggtgggataaagtggcctcgcagccgccgcaactctctgaagccgtgcccgtaacgctggggagcgatggcatggtgcgcctgccggttgaacagcttcgtgacggtaaactgcatcgtttcgtctgggtggcggacgatggcaaagcggtgcgcttcttcgtgattaaccgctatcccgacaagctgcgttttggcgtggtgttcgacgcctgcctgctgtgcggcgatcagggttatgtcatggagggcaatcaggttatctgcgtcgcctgcggagtgcatatttttattccgtctatcggcaaggccggtggctgtaacccggtgccgattgaaaactggcacaatgatgaaaaagagctggtgatccccggtaaagaactggcgacaggggtgaactacttctcgacggtcatgactattaaagtgaccgatccggtcgatggttcaacgttgaccaatacctcagccgattacaaatacagctatggcggcaagacctggttcttctcgtcagaggctaactatgaacgcttccgtgaaacgccggagcagtttgttcctgccgacatgagggaggaa

SEQ ID NO: 1262 - protein, 459 aa, Escherichia coli
MSYFFVTTLQVFFCIALLSGVLWSRNDPPSLRPLTWTLLTGLIAGVLAGLFIHGSQPVQLLLVGAEVMVSLLFVLSFWWASTRIRYLWQGILIFGAARHWALDPNLGGLTSTHVLNTDLLLNLTAVVLAFAILCLAGVLCAMLLRRIRGLYWPLTLILLVMIWLPLSGNLLLLLMKLQVVPLGKSLLSFVAKVTNNTALYNWAGAALLLALALCWLPALLRAFRQTRETEEPIAHRLALAQRRNALRLWLVTIGCAVVVIAGQLWWDKVASQPPQLSEAVPVTLGSDGMVRLPVEQLRDGKLHRFVWVADDGKAVRFFVINRYPDKLRFGVVFDACLLCGDQGYVMEGNQVICVACGVHIFIPSIGKAGGCNPVPIENWHNDEKELVIPGKELATGVNYFSTVMTIKVTDPVDGSTLTNTSADYKYSYGGKTWFFSSEANYERFRETPEQFVPADMREE

SEQ ID NO: 1263 - DNA, 525 bp, Escherichia coli
atgaccatgaagaaaaccctgattgccagcgcagtgatggccagcattttcattgcgccagccgcgtttgcttttaaagagtacccggcaggcgagcctgtcaccatgaatgaaatggagctggcggccgtttacctgcaaccgattgatatggaaccgcgcggcatgggcttaccggcagcaaaagccgatgttcaccttgaagcggatatccacgctgtagaaggcaataaaaacggctttggcgcaggggaatggatcccgtacctgaccatcagctacaccctggtcaacaacgacacgggcgaaaaacaggaaggcaccttcatgccgatggttgccagcgatggcccgcactatggcgcgaacatcaaaatgatgggcgtgggcaactataaagtgacctaccacattgaaccgccgtcaaaagccgggatgcatcgccatactgacagcgaaacaggcgtaggccgctggtggaaaccgtttgatgtgagctacgagtttaaatatgtcggtctgaac

SEQ ID NO: 1264 - protein, 175 aa, Escherichia coli
MTMKKTLIASAVMASIFIAPAAFAFKEYPAGEPVTMNEMELAAVYLQPIDMEPRGMGLPAAKADVHLEADIHAVEGNKNGFGAGEWIPYLTISYTLVNNDTGEKQEGTFMPMVASDGPHYGANIKMMGVGNYKVTYHIEPPSKAGMHRHTDSETGVGRWWKPFDVSYEFKYVGLN

SEQ ID NO: 1265 - DNA, 1938 bp, Escherichia coli
gtgcgtaacttccgtaactctttgttggttactctctttggcttgtttataagcatgagtgtctgggcgtcgacgaattatgcgcctttgattgaagatatcgagcaacgtcttgataaaacagcggaactttatcagcaacagcatgccgacgaggcgcgccgcacggtacaaatggcctattttgaggtgttcgagaacctggaagggccgatccgcatcaacatttccgcgcgcaaaagttacgagatggagagcgcattcggcgagatccgtcgaatgattggcgagaaaaaaccgctcgctgacgtccaggcgcgcattgactggctgaaagccgcactgcgcgaagtggaaccggtgctggatggcggacatcgtctggtggccgaagagcagcacaacgcgctgtccagggacgacattgccgttcactggcaggagagtttcaggacgatcgacgatctgctggcgcaggcggtcactgaatatcaggccgggaattacagcgttgccagtcagcacgttcaacaggcgcactatcagggctttaaaaactctgagatggagatgtccctcagacaaaaccgttctgcaaaagatgccgcctccattaaccaacaattctcatccctgattgcgctgaccgcgcaacctgaccatctcaacgatgtctcctatcaggtcactacgctgctacaggatatcgaggatatcttacccggcttgccaaccacccgtgacgatcagcaggttgccgcagcgcaaagcgcagacaacattccggcggcggacgagggaaataaccgcaccgactgggctgaggtgacgacgggaattaaccagagcattcaggacgcgatagcgcgctatcagggcggcgatgcgaagaatgcgattctggatatccaggatacctacttcgaccgcttcgaagccagcggcatggaaaacaaaatcggctctcgcgattcggcatttaaaaccacgctggaggcgtattttacccgcctggtcagtctgatgaaggccggtcagccggttgagcgcctgaatgcagaggccagcgcgctggcgcaggatctgcaaaaagccgtgacgatgctgggcgaaggcgaagaaacccagtggagtctgctgctctatagtctgatgatcatcgtgcgcgaggggctggaagcgctgctgattgttgcggcaatcgtggcctacatggtgaaaaacaaccatcaggataagctgccgcttattcgtcagtcggtaattgtggcgctgatcgccagcgtcatcaccgccgctatcttccagatgctgtttactaactccggcgccagccgtgaactgctggaaggcataacgatgctgattgccgtcgtgatgctgttctttatgagttactggctgctgtccaaagtggaagcgcgccactggaaagcctggctggaaggcaaactgtctcattccctgtcgcgaggctccctggtcggactatggctgaccagcttcctggcggtgtaccgcgaaggggcggaaacggtgctgttctattacgctctgattggcgatgcaaacacggtatccggccatatggcgattggcgccggttttgtgattggctgcgtggtgctgctgctcgcctggctggtgatgcgttactcagtggtgcgcctgccgctgaaacccttctttatgtttaccggcagtttcatgtatctgatggccttcgtctttgcgggcaaaggcgttctggaactggtggaaggcaaactgttccagcctacgttgattaacggcttccctgaaatcagctggctggggatttatccctacgtggaaacgttgttaccgcaggttgtattgctgctcgcggcgctggtggcgctgtgggtgatgcggcgcaaaagcgcggttcccggggagacgataaaaaataaccca

SEQ ID NO: 1266 - protein, 646 aa, Escherichia coli
VRNFRNSLLVTLFGLFISMSVWASTNYAPLIEDIEQRLDKTAELYQQQHADEARRTVQMAYFEVFENLEGPIRINISARKSYEMESAFGEIRRMIGEKKPLADVQARIDWLKAALREVEPVLDGGHRLVAEEQHNALSRDDIAVHWQESFRTIDDLLAQAVTEYQAGNYSVASQHVQQAHYQGFKNSEMEMSLRQNRSAKDAASINQQFSSLIALTAQPDHLNDVSYQVTTLLQDIEDILPGLPTTRDDQQVAAAQSADNIPAADEGNNRTDWAEVTTGINQSIQDAIARYQGGDAKNAILDIQDTYFDRFEASGMENKIGSRDSAFKTTLEAYFTRLVSLMKAGQPVERLNAEASALAQDLQKAVTMLGEGEETQWSLLLYSLMIIVREGLEALLIVAAIVAYMVKNNHQDKLPLIRQSVIVALIASVITAAIFQMLFTNSGASRELLEGITMLIAVVMLFFMSYWLLSKVEARHWKAWLEGKLSHSLSRGSLVGLWLTSFLAVYREGAETVLFYYALIGDANTVSGHMAIGAGFVIGCVVLLLAWLVMRYSVVRLPLKPFFMFTGSFMYLMAFVFAGKGVLELVEGKLFQPTLINGFPEISWLGIYPYVETLLPQVVLLLAALVALWVMRRKSAVPGETIKNNP

SEQ ID NO: 1267 - DNA, 759 bp, Escherichia coli
atgcgcaagggtaaaattattgttgcatcaatgatggtgctttgtgtccttatttttgttgcggcggcggcatggtttatgctgttccagggagaaatgacggagccgacagaggaggaaaaacaggcggcaattttacacgctgcgggcctgatgaaatcagagacccaggataaaaaatcagtcgaaacgctctatcatcgttatattattcaacgccatgttaatttagattccggcgaactggtggctggcagcagcgcggacaccgcgcggcagaagtgtgaaaaacttgcccctgaacgcgacccagcgcaggttcgtcagcgctgtacggtggcggatgtgttctttgtgaaagataaaaataatgaaattcagcaggttatcattccagttaccggtaagggcgcgaaatccatgatgcatgcgtttcttgctctggggctggacggtcgtacggtgagaaatctgtattattatcagcaacgggaaacgccgtttctgggggctagggtggaagacgccaactggcgcaaacagtggccagggaaacgattattagataacagcggacatcctgcattgaaaatagtacaggataaacctgaacatgccgatgaatataccgttgacggtatttccggtgcgacgttgacatcaaccggcgttgagaaaagtattaactactggatggggccgcagggatatggtcaattcttacagcgtcttgccagcgatcgaaataaccttaatctt

SEQ ID NO: 1268 - protein, 253 aa, Escherichia coli
MRKGKIIVASMMVLCVLIFVAAAAWFMLFQGEMTEPTEEEKQAAILHAAGLMKSETQDKKSVETLYHRYIIQRHVNLDSGELVAGSSADTARQKCEKLAPERDPAQVRQRCTVADVFFVKDKNNEIQQVIIPVTGKGAKSMMHAFLALGLDGRTVRNLYYYQQRETPFLGARVEDANWRKQWPGKRLLDNSGHPALKIVQDKPEHADEYTVDGISGATLTSTGVEKSINYWMGPQGYGQFLQRLASDRNNLNL

SEQ ID NO: 1269 - DNA, 504 bp, Escherichia coli
atgctcagtaaactgcgccgctggctgcgtgaaggcgcgatcttactggttctgctggctggcgtgataatcctgctggatgtctggcgttctccgcagatgccggccatgtttgacagcacgccgctgcatacgctggacggggaaaccgtaacgctggcgtcgatcagtgaagaacgcccggtgctgctctacttctgggcgagctggtgcggtatctgccgtttcaccacgccggatgtcgcccgtttgcagtcggaaggggagagcgtcatgaccatcgcgctgcgttccggtaatgacggggaggtttcccgctggttatcgcgtaaaagggtgacgttccctgtcgtgaatgatagcggcggtgagatatcacgaaactgggaaatcagcgtcacgccaacgctggtggtggtgtcgaaggggcaggtggtaactacgaccagcggctggaccagctactggggcatgaagttacgtctgtggcgggcagccatgttt

SEQ ID NO: 1270 - protein, 168 aa, Escherichia coli
MLSKLRRWLREGAILLVLLAGVIILLDVWRSPQMPAMFDSTPLHTLDGETVTLASISEERPVLLYFWASWCGICRFTTPDVARLQSEGESVMTIALRSGNDGEVSRWLSRKRVTFPVVNDSGGEISRNWEISVTPTLVVVSKGQVVTTTSGWTSYWGMKLRLWRAAMF

SEQ ID NO: 1271 - DNA, 714 bp, Escherichia coli
atggagctgcacatgaacccattcaaaggccggcattttcagcgtgacatcattctgggggccgtacgctggtactgcaaatacggcatcagttaccgtgagctgcaggagatgctggctgaacgcggagtgaatgtcgatcactccacgatttaccggtgggttcagcgttatgcgcctgaaatggaaaaacggctgcgctggtactggcgtaacccttccgatctttgcccgtggcacatggatgaaacctacgtgaaggtcaatggccgctgggcgtatctgtaccgggccgtcgacagccggggccgcactgtcgatttttatctctcctcccgtcgtaacagcaaagctgcatacctgtttctgggtaaaatcctcaacaacgtgaagaagtggcagatcccgcgattcatcaacacggataaagcgcccgcctatggtcgcgcgcttgctctgctcaaacgcgaaggccggtgcccgtctgacgttgaacaccgacagattaagtaccggaacaacgtgattgaatgcgatcatggcaaactgaaacggataatcggcgccacgctgggatttaaatccatgaagacggcttacgccaccatcaaaggtattgaggtgatgggtgcactacgcaaaggccaggcctcagcattttattatggtgatcccctgggcgaaatgcgcctggtaagcagagtttttgaaatg

SEQ ID NO: 1272 - protein, 238 aa, Escherichia coli
MELHMNPFKGRHFQRDIILGAVRWYCKYGISYRELQEMLAERGVNVDHSTIYRWVQRYAPEMEKRLRWYWRNPSDLCPWHMDETYVKVNGRWAYLYRAVDSRGRTVDFYLSSRRNSKAAYLFLGKILNNVKKWQIPRFINTDKAPAYGRALALLKREGRCPSDVEHRQIKYRNNVIECDHGKLKRIIGATLGFKSMKTAYATIKGIEVMGALRKGQASAFYYGDPLGEMRLVSRVFEM

SEQ ID NO: 1273 - DNA, 4576 bp, Escherichia coli
  misc_feature (36)..(62): unknown
gggggcggggcggggcgggcccggtccgggtgtgtnnnnnnnnnnnnnnnnnnnnnnnnnnncgttccactgagcgtcagccctctaaaactactgaataatcagttagaaaacaaacaatcggaaaaatctggggttccggcctagaaccccatgaacaggcatagctgtgatttcatttaattattggcacaaatcagttgatcgtacaatgctgtgcctgtctcgttttctggagattcctcagcctcatggagcggcgtaacaggcgtaccggcaggacagagatgtttgcttttcctagtccggccagtttagtggaataacggagtttttatcccatgttttttccccccgatcacgactttttcaaatcaatgctcagaatacgttctttagctccttccacaaacacatcaggatcccaatcgcggttaaagccttctttgatgccaatgtaaagggtatccatatcgtccgacaacaccatctggtttgggtagaccggcatgttaaattcacgggtgatgctgtatttggtggcatccactacgctgatggtgccgctagtgaagttggtgacatacagttcgttatatttcggattgtatttcaccgcgttagctccggctcctgtgtgcacatagccaagctgtttaccgtcgcgtaagtcaaaaatatagagtccatcttttgtaccggaacgatcgtcatggtcgaataccaccacaaaggcacggtcagaagcggagtccaccgccagattctgcacacttgtgatttgtggtctcggatctttcaacgggatggtacgcagcagcgtctgatttttcgcatcaatttcgttgatgtaatctcttccgccaacgtagattttctgtgttttttcatccatcgtcagaccatacgctgtacctttgtaagcatccttaacctcgccttttaaggcaagcgtcgtcccgtcgagcattaacagcttatgcagaggcttcatgccctcggccgttttcagcatattgctataactcacaaacagggtatcggaatcctggctgtaaaccatatggcgaaaatgctcaaaacgcgaatctgcagcgtttgccgctttaaaacttaacctgtcgctggttcttaccagtttgccggttggggtgtcaaacatactgatacgcagggacgctgactgggtgtgtccgatatagagctgatgtttatcctgatttatcgccagcgaaaatgcccggtatggcatcgtgtatttattttcgactttcagcgaatctgaattaaacgaatacagatagcctttattggcttcacgatttacacgatcggtgactgctgcaaacacctttttactggcattatcaaacgccagttcatagacgccttcatcaggggactgaaggtaattcgttttcagggcaaatcgcgaaagttcgcgttcaggtggatcgatagccatggccatcgtgggtaaaaatagtgaaattaacaggtatagcggtgctttggataaagtgaaaatattcatttttcgttcctgcaataaaattgacataagagagaaaacgtattgtctgaacctagcggaaattgtcatcagaaacgaatgtccccgccaaatatccatgttctgccacgcgcggaattggctgggtgggtctcgtcaccaagacctggcatcatgttgagcttattcagcgcctccgaataatctctgttcatcaggttttgtaccgaaagtttcagtgtcaggttgcggttgtactcgtaagtaccatagagatcgataatcgttgggatctgcggcaaatcctgtttgattattgcgccggtatgttcgtcctgctcaaaatcaggcgacaggcgacgagccttgcctgtgtattttatgatagtgcccagggtcaacgcgttatcgaagaagcgaacaccagtatccagcgtcatgtattttctgggcagttcggttatatcccctgcgccaaagtgggtgctggcgatggaggttggctggtctgtttgctgctggctgaaagagagtcggccaaaagcaaaacctgcatcataatccatctccagttcgaagccctttgcgataacgtcgcttgccgagttaacgtagatgtacatattgtcgctgtattcatcgctaatgccctcccagccattgccaatcacctcaggcagactgcatttacgacctccagaacaaaccagataagactcgctgtagatgtagttctggatcctgctgcggtacgccagagccttaaagcgcagggcatcctgttcgaccagtaaatctctggtatcaatgttaaaacccgcctgccaggtttctgcacgttcaggcttcaggaatgggttcatggatgcgcctcctgaattagagaagaacatctcctggatgttcggggcgcgcatggatttgctgtagccaatgaacggctgaagccatggtgttacctgagcagaaagctgaactgaagggttgaagccaccctctttatcgtcaatatcgtagctaccctgtggcacgcagataacgcgtgaatcgcaggcgggcttgtaccctgtgatcctgttacgtgtgtagttgagattgaaatctgcctcccagatgccgcgcgtaaccttcagcccggtatacagcgctgaaatatcctgctggccggagggtgcgaacggattgttctcgatcgattcctgattcgctttcgggtcgcccgccgctgagtgaatggtccggtcatagcgggtacgcatcagtttgctgcccagcataaactccaggtcattgtccgcgacagtgaaccggctggtattgttgatatccagcgcgtcagaacgattttgcgctgaggttttgtagaaagtatacagcgagccatcacgatacttttgattaccgcgactggtactggccgttacgttaaagtcaattaattcagaaaaaggggtgtaatgatatttaatgtaatagtcgtcactggttatatcacgacgtgtaaatttattttcataggttcgagcggaaagttcgaagctgttaaattcgtctggtctgatatccattttatacagttgggatttggggttctgcttcatatatttatcataaccaaactctttgctgttaattccagaaccatttgagaaattagagtacacagaactgccgctcacagcagccataacgccaatgcttcccgtatccgtaaaagcgtcgctttttccaccaagggcgatcattccgctgcgtcccagcccattactaccgacagagaaacgtgaacgaaggccatatgtattaccgttaaatattacatcgtcaacgccaatagtacgcatatttgcactaccggcaagggcgttgatcccttcagagccactgctgtcaccgcgtgtaacatcaactgctaccagtaagttaggatctataagtacgccagccatattgttagttgaaccatgcgtcgttgttccggaggtagaggttccgtaaaaactctgggtaataccatcgaccatagtgtttacacgaccaaatccgctcatgcctcgaatattcacactgattgctccctgaccaggatctatttgagtataagtaccaggcatactacgcactgttgcgtcaagtgattgcaggtttttgtccgttgtccgggaactggtcgcgcctgttttctcgagagcttcctgctcactggtcgtcttcccgacagaaacgctgagcggactgaattctgccgctccttttttgtcggaattagttttttcactgatggattgtgagtaagcaccgcagctgagcaataatatgcctgagccgatagccagttttataacgttcataaatttccttgggtataatattaataaagataagtataactatttgtttattaattatgttctactgtctttttgatttttttgacagtggaaaagtttgataaaatgttcagcataaaaatgaaaattaaatttcagttaaatgaacttgaacggccaattatccctttactccttcaacttaaaggtaatcggcatttttactttaaataatcctccctccaatatttcaggcggtggtttgggaagtggttgagcgcgttctaaaacagcaatagcttcgcggtcaagagaaaaggttcctgaagagatttccaagaaactactgacaatagtgccttccgtgtttacggtaaaagtcacgacggctgtgccggttcgtgcacgttttctggcatcgccagggtaacgtttataacggtttaggtggccttttactctgctttcccaagatgcctcagaattatctcgctttgttgagtcactgttaaaaggcgcagcaatacgggacgattcgaccagagcctgaggtgcagcattactggaaacggctgtggggttgctgtcgctggtttgagcctttatcttacgaggtggacgtgtctttttcttttctccatcggatgactttttcttcctagttatttcaatggttgcatcactgtcttcagtgacaggacgttgttgtctgtcctcagtttgttgcttttct

SEQ ID NO: 1274 - DNA, 1272 bp, Escherichia coli
atggatatttggcggggacattcgtttctgatgacaatttccgctaggttcagacaatacgttttctctcttatgtcaattttattgcaggaacgaaaaatgaatattttcactttatccaaagcaccgctatacctgttaatttcactatttttacccacgatggccatggctatcgatccacctgaacgcgaactttcgcgatttgccctgaaaacgaattaccttcagtcccctgatgaaggcgtctatgaactggcgtttgataatgccagtaaaaaggtgtttgcagcagtcaccgatcgtgtaaatcgtgaagccaataaaggctatctgtattcgtttaattcagattcgctgaaagtcgaaaataaatacacgatgccataccgggcattttcgctggcgataaatcaggataaacatcagctctatatcggacacacccagtcagcgtccctgcgtatcagtatgtttgacaccccaaccggcaaactggtaagaaccagcgacaggttaagttttaaagcggcaaacgctgcagattcgcgttttgagcattttcgccatatggtttacagccaggattccgataccctgtttgtgagttatagcaatatgctgaaaacggccgagggcatgaagcctctgcataagctgttaatgctcgacgggacgacgcttgccttaaaaggcgaggttaaggatgcttacaaaggtacagcgtatggtctgacgatggatgaaaaaacacagaaaatctacgttggcggaagagattacatcaacgaaattgatgcgaaaaatcagacgctgctgcgtaccatcccgttgaaagatccgagaccacaaatcacaagtgtgcagaatctggcggtggactccgcttctgaccgtgcctttgtggtggtattcgaccatgacgatcgttccggtacaaaagatggactctatatttttgacttacgcgacggtaaacagcttggctatgtgcacacaggagccggagctaacgcggtgaaatacaatccgaaatataacgaactgtatgtcaccaacttcactagcggcaccatcagcgtagtggatgccaccaaatacagcatcacccgtgaatttaacatgccggtctacccaaaccagatggtgttgtcggacgatatggataccctttacattggcatcaaagaaggctttaaccgcgattgggatcctgatgtgtttgtggaaggagctaaagaacgtattctgagcattgatttgaaaaagtcg

SEQ ID NO: 1275 - protein, 424 aa, Escherichia coli
MDIWRGHSFLMTISARFRQYVFSLMSILLQERKMNIFTLSKAPLYLLISLFLPTMAMAIDPPERELSRFALKTNYLQSPDEGVYELAFDNASKKVFAAVTDRVNREANKGYLYSFNSDSLKVENKYTMPYRAFSLAINQDKHQLYIGHTQSASLRISMFDTPTGKLVRTSDRLSFKAANAADSRFEHFRHMVYSQDSDTLFVSYSNMLKTAEGMKPLHKLLMLDGTTLALKGEVKDAYKGTAYGLTMDEKTQKIYVGGRDYINEIDAKNQTLLRTIPLKDPRPQITSVQNLAVDSASDRAFVVVFDHDDRSGTKDGLYIFDLRDGKQLGYVHTGAGANAVKYNPKYNELYVTNFTSGTISVVDATKYSITREFNMPVYPNQMVLSDDMDTLYIGIKEGFNRDWDPDVFVEGAKERILSIDLKKS

SEQ ID NO: 1276 - DNA, 2259 bp, Escherichia coli
atgaacgttataaaactggctatcggctcaggcatattattgctcagctgcggtgcttactcacaatccatcagtgaaaaaactaattccgacaaaaaaggagcggcagaattcagtccgctcagcgtttctgtcgggaagacgaccagtgagcaggaagctctcgagaaaacaggcgcgaccagttcccggacaacggacaaaaacctgcaatcacttgacgcaacagtgcgtagtatgcctggtacttatactcaaatagatcctggtcagggagcaatcagtgtgaatattcgaggcatgagcggatttggtcgtgtaaacactatggtcgatggtattacccagagtttttacggaacctctacctccggaacaacgacgcatggttcaactaacaatatggctggcgtacttatagatcctaacttactggtagcagttgatgttacacgcggtgacagcagtggctctgaagggatcaacgcccttgccggtagtgcaaatatgcgtactattggcgttgacgatgtaatatttaacggtaatacatatggccttcgttcacgtttctctgtcggtagtaatgggctgggacgcagcggaatgatcgcccttggtggaaaaagcgacgcttttacggatacgggaagcattggcgttatggctgctgtgagcggcagttctgtgtactctaatttctcaaatggttctggaattaacagcaaagagtttggttatgataaatatatgaagcagaaccccaaatcccaactgtataaaatggatatcagaccagacgaatttaacagcttcgaactttccgctcgaacctatgaaaataaatttacacgtcgtgatataaccagtgacgactattacattaaatatcattacacccctttttctgaattaattgactttaacgtaacggccagtaccagtcgcggtaatcaaaagtatcgtgatggctcgctgtatactttctacaaaacctcagcgcaaaatcgttctgacgcgctggatatcaacaataccagccggttcactgtcgcggacaatgacctggagtttatgctgggcagcaaactgatgcgtacccgctatgaccggaccattcactcagcggcgggcgacccgaaagcgaatcaggaatcgatcgagaacaatccgttcgcaccctccggccagcaggatatttcagcgctgtataccgggctgaaggttacgcgcggcatctgggaggcagatttcaatctcaactacacacgtaacaggatcacagggtacaagcccgcctgcgattcacgcgttatctgcgtgccacagggtagctacgatattgacgataaagagggtggcttcaacccttcagttcagctttctgctcaggtaacaccatggcttcagccgttcattggctacagcaaatccatgcgcgccccgaacatccaggagatgttcttctctaattcaggaggcgcatccatgaacccattcctgaagcctgaacgtgcagaaacctggcaggcgggttttaacattgataccagagatttactggtcgaacaggatgccctgcgctttaaggctctggcgtaccgcagcaggatccagaactacatctacagcgagtcttatctggtttgttctggaggtcgtaaatgcagtctgcctgaggtgattggcaatggctgggagggcattagcgatgaatacagcgacaatatgtacatctacgttaactcggcaagcgacgttatcgcaaagggcttcgaactggagatggattatgatgcaggttttgcttttggccgactctctttcagccagcagcaaacagaccagccaacctccatcgccagcacccactttggcgcaggggatataaccgaactgcccagaaaatacatgacgctggatactggtgttcgcttcttcgataacgcgttgaccctgggcactatcataaaatacacaggcaaggctcgtcgcctgtcgcctgattttgagcaggacgaacataccggcgcaataatcaaacaggatttgccgcagatcccaacgattatcgatctctatggtacttacgagtacaaccgcaacctgacactgaaactttcggtacaaaacctgatgaacagagattattcggaggcgctgaataagctcaacatgatgccaggtcttggtgacgagacccacccagccaattccgcgcgtggcagaacatggatatttggcggggacattcgtttc

SEQ ID NO: 1277 - protein, 753 aa, Escherichia coli
MNVIKLAIGSGILLLSCGAYSQSISEKTNSDKKGAAEFSPLSVSVGKTTSEQEALEKTGATSSRTTDKNLQSLDATVRSMPGTYTQIDPGQGAISVNIRGMSGFGRVNTMVDGITQSFYGTSTSGTTTHGSTNNMAGVLIDPNLLVAVDVTRGDSSGSEGINALAGSANMRTIGVDDVIFNGNTYGLRSRFSVGSNGLGRSGMIALGGKSDAFTDTGSIGVMAAVSGSSVYSNFSNGSGINSKEFGYDKYMKQNPKSQLYKMDIRPDEFNSFELSARTYENKFTRRDITSDDYYIKYHYTPFSELIDFNVTASTSRGNQKYRDGSLYTFYKTSAQNRSDALDINNTSRFTVADNDLEFMLGSKLMRTRYDRTIHSAAGDPKANQESIENNPFAPSGQQDISALYTGLKVTRGIWEADFNLNYTRNRITGYKPACDSRVICVPQGSYDIDDKEGGFNPSVQLSAQVTPWLQPFIGYSKSMRAPNIQEMFFSNSGGASMNPFLKPERAETWQAGFNIDTRDLLVEQDALRFKALAYRSRIQNYIYSESYLVCSGGRKCSLPEVIGNGWEGISDEYSDNMYIYVNSASDVIAKGFELEMDYDAGFAFGRLSFSQQQTDQPTSIASTHFGAGDITELPRKYMTLDTGVRFFDNALTLGTIIKYTGKARRLSPDFEQDEHTGAIIKQDLPQIPTIIDLYGTYEYNRNLTLKLSVQNLMNRDYSEALNKLNMMPGLGDETHPANSARGRTWIFGGDIRF

SEQ ID NO: 1278 - DNA, 540 bp, Escherichia coli
gaaaagcaacaaactgaggacagacaacaacgtcctgtcactgaagacagtgatgcaaccattgaaataactaggaagaaaaagtcatccgatggagaaaagaaaaagacacgtccacctcgtaagataaaggctcaaaccagcgacagcaaccccacagccgtttccagtaatgctgcacctcaggctctggtcgaatcgtcccgtattgctgcgccttttaacagtgactcaacaaagcgagataattctgaggcatcttgggaaagcagagtaaaaggccacctaaaccgttataaacgttaccctggcgatgccagaaaacgtgcacgaaccggcacagccgtcgtgacttttaccgtaaacacggaaggcactattgtcagtagtttcttggaaatctcttcaggaaccttttctcttgaccgcgaagctattgctgttttagaacgcgctcaaccacttcccaaaccaccgcctgaaatattggagggaggattatttaaagtaaaaatgccgattacctttaagttgaaggag

SEQ ID NO: 1279 - protein, 180 aa, Escherichia coli
EKQQTEDRQQRPVTEDSDATIEITRKKKSSDGEKKKTRPPRKIKAQTSDSNPTAVSSNAAPQALVESSRIAAPFNSDSTKRDNSEASWESRVKGHLNRYKRYPGDARKRARTGTAVVTFTVNTEGTIVSSFLEISSGTFSLDREAIAVLERAQPLPKPPPEILEGGLFKVKMPITFKLKE

SEQ ID NO: 1280 - DNA, 1906 bp, Escherichia coli
  misc_feature (261)..(261): unknown
accagtgtcacggttgataacaaatgtcgccaaggggggatttactgcaccaaagctggcaggtgataagtgctgccggacaatgccgggtgaaaaggtgttttcgggttgcccggggtgatacatccgggcagtatgttgcgttaaaaacagtcgcattgtctctggggttaccggttgtgaccgccattacccatcgtccggtacagcgctgtacattgattacagctcagtgaatcagcgctttctggctttcgtcgngtcattctgtcaacgccacgatgtttgaccgttatggggatgcggacgattccctgcacagcgttgtttcacggtggtggatgacgcaacaccgctgttaaaaacagtcgttcagtcctttgtgttaccggttgtgacaacaatcagttggtaatggacgtgtgaaccatctgcgcttccgttgatttttatggactgataaagttttgccagctgaatctttatacggaatgctcttcagtatgcgtacacgaattgactatctggcggataaatactcttttaccgaacggaatgaatctccacgccttcgccggcagtggcaggatgttctggaggagtgtcggctgacagaggccggaccagaagaacggctgcgtattgccctgctgaatgtggattacgtcaccagttttgaactgccttttcgcttgttgcttactcgtacaccacaactgattgccgcgcttcgggaagaatggggcctcagccagaaaaatgtggtgttcaacgataaacggtttggctgcgtgtacagcctgaaggccagtctttctggtgtaccggatacattccggtatcatctgtctcatcgtattcgccggatggttgggaatgaaaatacatcatcgccatatcagcagattgcccgggaagtgaaagtgccccgtgaacggctgaagtatgcgctggaagccggtttactggtgactgcactggacgggctgttctggtctggtagtcagcgcattgcggctgatatcctgagactgagaaagagcggaatgccggtggtgacaacgtccgtggaagcgagcgataacctgacgggaacaacccgcaaaataccggcataccatctctgacattgcgatgaagggcaaatttcaccttgacaggggcagagttccgctttttatactttattcccgtgtctgaaaaaaatgtgcaaaggaaacgggaatggcaaggtccgattacgattttatcaatctgtctctgggacatgaactgaatgagtggctggcagagagaggttatgccggacaggcggataaccggaaccgactggcagaggtggttacccgcaaattgcgggacagtttttatgcggacgtctcctgggatgcgctgaatgtggcatacagtgaacaccctgagtggttttcagagcttgcctccggggatgaggattaacaggcaaattatgctgctatcgggcagagtgattacctgcagggatttccatttataagaatacgccgcttcgggaaagctccggttctccggagagttacgattatttttactcaaattcacaacacctgaactggaacttgcgttgtgtcccggattgttactccgcaggaagcatcctttttaccatacggatgtttgttttccatttcccctccgaaaaatacaactccgatcacatttctgatattttccccggattttacataacaggattgtttctgtatgttttttatctggtgtaaatttcagcactgacattccgcttacgttaatttacactggataccccacgaggagaatatgcagcaccggcaggataacttactggcgaacagaaatttgttgcctggtatggtttccggtcagtacgcattcaggatccgta

SEQ ID NO: 1281 - DNA, 231 bp, Escherichia coli
accagtgtcacggttgataacaaatgtcgccaaggggatttactgcaccaaagctggcaggtgataagtgctgccggacaatgccgggtgaaaaggtgttttcgggttgcccggggtgatacatccgggcagtatgttgcgttaaaaacagtcgcattgtctctggggttaccggttgtgaccgccattacccatcgtccggtacagcgctgtacattgattacagctcag

SEQ ID NO: 1282 - protein, 77 aa, Escherichia coli
TSVTVDNKCRQGDLLHQSWQVISAAGQCRVKRCFRVARGDTSGQYVALKTVALSLGLPVVTAITHRPVQRCTLITAQ

SEQ ID NO: 1283 - DNA, 634 bp, Escherichia coli
atgctcttcagtatgcgtacacgaattgactatctggcggataaatactcttttaccgaacggaatgaatctccacgccttcgccggcagtggcaggatgttctggaggagtgtcggctgacagaggccggaccagaagaacggctgcgtattgccctgctgaatgtggattacgtcaccagttttgaactgccttttcgcttgttgcttactcgtacaccacaactgattgccgcgcttcgggaagaatggggcctcagccagaaaaatgtggtgttcaacgataaacggtttggctgcgtgtacagcctgaaggccagtctttctggtgtaccggatacattccggtatcatctgtctcatcgtattcgccggatggttgggaatgaaaatacatcatcgccatatcagcagattgcccgggaagtgaaagtgccccgtgaacggctgaagtatgcgctggaagccggtttactggtgactgcactggacgggctgttctggtctggtagtcagcgcattgcggctgatatcctgagactgagaaagagcggaatgccggtggtgacaacgtccgtggaagcgagcgataacctgacgggaacaacccgcaaaataccggcataccatctct

SEQ ID NO: 1284 - protein, 211 aa, Escherichia coli
MLFSMRTRIDYLADKYSFTERNESPRLRRQWQDVLEECRLTEAGPEERLRIALLNVDYVTSFELPFRLLLTRTPQLIAALREEWGLSQKNVVFNDKRFGCVYSLKASLSGVPDTFRYHLSHRIRRMVGNENTSSPYQQIAREVKVPRERLKYALEAGLLVTALDGLFWSGSQRIAADILRLRKSGMPVVTTSVEASDNLTGTTRKIPAYHL

SEQ ID NO: 1285 - DNA, 232 bp, Escherichia coli
atggcaaggtccgattacgattttatcaatctgtctctgggacatgaactgaatgagtggctggcagagagaggttatgccggacaggcggataaccggaaccgactggcagaggtggttacccgcaaattgcgggacagtttttatgcggacgtctcctgggatgcgctgaatgtggcatacagtgaacaccctgagtggttttcagagcttgcctccggggatgaggatt

SEQ ID NO: 1286 - protein, 77 aa, Escherichia coli
MARSDYDFINLSLGHELNEWLAERGYAGQADNRNRLAEVVTRKLRDSFYADVSWDALNVAYSEHPEWFSELASGDED

SEQ ID NO: 1287 - DNA, 198 bp, Escherichia coli
atgtcagtgctgaaatttacaccagataaaaaacatacagaaacaatcctgttatgtaaaatccggggaaaatatcagaaatgtgatcggagttgtatttttcggaggggaaatggaaaacaaacatccgtatggaaaaaggatgcttcctgcggagtaacaatccgggacacaacgcaagttccagttcaggtgttg

SEQ ID NO: 1288 - protein, 66 aa, Escherichia coli
MSVLKFTPDKKHTETILLCKIRGKYQKCDRSCIFRRGNGKQTSVWKKDASCGVTIRDTTQVPVQVL

SEQ ID NO: 1289 - DNA, 2536 bp, Escherichia coli
ctgattcgcggttcccgccaagggcataaattttgcgccctacactggtgaaattcatgataaacgctgtcagcagcaccaccgtaatcatggcgatcagcggcagaccaaggccatagtcatagccatcagcatcggtgtacttgaacaacattaccccctgctcaaaccacggcggaaagtcgtacagccacacacctttactcaaccataacagcaggccataaaaaatattcagcgtcgagatagtgatgatgatagaaggcacccgtaggcgattaaccagtaaggcgttaattaagccaagtaaaatgccgatgccgcccgccagggcaaacgcgacagcaaagttgccaccaattttttgcagcagcagcaccatgccgtattgcgcaatgatggtcattgccggaaacgaaatatcaatcccaccggaaattaacaccacaaacaaaccacaggcgagaatagtcaacatggcatagttattggcgagatcgtacaaattaccgaatgtcagaaactcgtcgctgcgccaggcaaggccaacaaacagcaccacaatcagtaatgccagccagaattcatggcgttttttcagttcagccatttaccacctccgcaatcctggcctgagaactgctgtcaggcaggaagctatgggtgatctgacctttttgcattaccaaaatccggtggctttgataccacgcttcttcaatttcatcgcagatcatcaataccgcaatgccatgagccgccagatcgctgataatgccgtatattcctgctttgttggcgatatcaacaccgactgtcgggctatcgagaatcaacagtcgtggcccaatcgccagccatttggcgatcgatactcgctgcgcgttaccaccagaaagcgtattcaccgggagatgaggatcagagactttgatggtcaatgccttgattagcctgtccaccaggtcacacactttagcttcactcagaaagccgaagcgatcttttaccttgtgaaaaacagtgctaatgatgttgtcttcaatagattgcgccatcaccaaaccgcgcgacatgcgatcttccgaaacataaccaataccgtggcggatggcgtcctggttactatgcagtgtaaccagctggccgttgatgaggatctcgccagcatccggtcgggtcataccaaacagactcagacataattccgtgcgccccgcaccaagcaggccaacaatcgataccacttcgcccgcttccacccgcaagttaatatttagatattccccatgacgacttaaattacgcacctccagcaccggggtgctggattttccctgccacaactctcgcacctgatattcaaactcctggccggtcatcagaaaaccgagttgttttgtggtcatctctgcggccggaaaggtcccgaccagctcaccatctttcagcactgaaatacggtcggaaacttccatcacttcttccagacgatgactgacgaagaccacgcagatcccgcgttcccgcaattgatgcaccacctgtaataacccttgcacttcctgatgggtcagcgaagcggttggttcatccatcacgatcaaccgtgcgtcctgcgccagtgcacggcaaattgccaccagctgacagcgggcaattgaaagctcagaaacgagcgtatccagtggcaatgtgacgttaatactggtcattgccgcctgcgccacctcacgcagacgacgtcggttaacaaacagaccgtggtgatagtgattcacggcgatattctcccagacactcaggttaggaaataaagagaggtcctgataaatcacctgaatcccctgcgccaccgaagcggcgggtgtcagctttgaccagtttttcccaccaagcgtaatttccgctccctcatccgggcgataaacaccggacataattttaatcaacgtcgatttaccacagccgttttgcccggcaagacagtgcacttcacccgacataaagtcgagagaaacatcgcgcagcgctcgcgtggcatgaaacgttttgttgatatgacgaagggaaaggaaggtttccataacatcccctggcaataagaatcggggctttcgccccgaagaaatggattaataaagtgagtcgatattgtctttgttgaccagtaataccttatggaaacggataattcgcttatccatatctacgtcggccttacccagattctgcatttctaatccaggtttgatctcttcacccttcagcaacgtgctggcgacggccgcgagtgcgtaacctgcagaggccggatcgtaagtaatcccttcggtgatatcaccacttttaatcagtgatgccgcctgtgaagggatcatcatgccatagactgcgactttatttttcgcccgtttctctttcactgcacgtcccgcgccaatcggaccgtttgaaccaaaggagacaaccgctttcaagtcaggataggttttcatcaggtccagtgtagtacgacgtgagtcatccacactct

SEQ ID NO: 1290 - DNA, 609 bp, Escherichia coli
atggctgaactgaaaaaacgccatgaattctggctggcattactgattgtggtgctgtttgttggccttgcctggcgcagcgacgagtttctgacattcggtaatttgtacgatctcgccaataactatgccatgttgactattctcgcctgtggtttgtttgtggtgttaatttccggtgggattgatatttcgtttccggcaatgaccatcattgcgcaatacggcatggtgctgctgctgcaaaaaattggtggcaactttgctgtcgcgtttgccctggcgggcggcatcggcattttacttggcttaattaacgccttactggttaatcgcctacgggtgccttctatcatcatcactatctcgacgctgaatattttttatggcctgctgttatggttgagtaaaggtgtgtggctgtacgactttccgccgtggtttgagcagggggtaatgttgttcaagtacaccgatgctgatggctatgactatggccttggtctgccgctgatcgccatgattacggtggtgctgctgacagcgtttatcatgaatttcaccagtgtagggcgcaaaatttatgcccttggcgggaaccgcgaatca

SEQ ID NO: 1291 - protein, 203 aa, Escherichia coli
MAELKKRHEFWLALLIVVLFVGLAWRSDEFLTFGNLYDLANNYAMLTILACGLFVVLISGGIDISFPAMTIIAQYGMVLLLQKIGGNFAVAFALAGGIGILLGLINALLVNRLRVPSIIITISTLNIFYGLLLWLSKGVWLYDFPPWFEQGVMLFKYTDADGYDYGLGLPLIAMITVVLLTAFIMNFTSVGRKIYALGGNRES

SEQ ID NO: 1292 - DNA, 1482 bp, Escherichia coli
atggaaaccttcctttcccttcgtcatatcaacaaaacgtttcatgccacgcgagcgctgcgcgatgtttctctcgactttatgtcgggtgaagtgcactgtcttgccgggcaaaacggctgtggtaaatcgacgttgattaaaattatgtccggtgtttatcgcccggatgagggagcggaaattacgcttggtgggaaaaactggtcaaagctgacacccgccgcttcggtggcgcaggggattcaggtgatttatcaggacctctctttatttcctaacctgagtgtctgggagaatatcgccgtgaatcactatcaccacggtctgtttgttaaccgacgtcgtctgcgtgaggtggcgcaggcggcaatgaccagtattaacgtcacattgccactggatacgctcgtttctgagctttcaattgcccgctgtcagctggtggcaatttgccgtgcactggcgcaggacgcacggttgatcgtgatggatgaaccaaccgcttcgctgacccatcaggaagtgcaagggttattacaggtggtgcatcaattgcgggaacgcgggatctgcgtggtcttcgtcagtcatcgtctggaagaagtgatggaagtttccgaccgtatttcagtgctgaaagatggtgagctggtcgggacctttccggccgcagagatgaccacaaaacaactcggttttctgatgaccggccaggagtttgaatatcaggtgcgagagttgtggcagggaaaatccagcaccccggtgctggaggtgcgtaatttaagtcgtcatggggaatatctaaatattaacttgcgggtggaagcgggcgaagtggtatcgattgttggcctgcttggtgcggggcgcacggaattatgtctgagtctgtttggtatgacccgaccggatgctggcgagatcctcatcaacggccagctggttacactgcatagtaaccaggacgccatccgccacggtattggttatgtttcggaagatcgcatgtcgcgcggtttggtgatggcgcaatctattgaagacaacatcattagcactgtttttcacaaggtaaaagatcgcttcggctttctgagtgaagctaaagtgtgtgacctggtggacaggctaatcaaggcattgaccatcaaagtctctgatcctcatctcccggtgaatacgctttctggtggtaacgcgcagcgagtatcgatcgccaaatggctggcgattgggccacgactgttgattctcgatagcccgacagtcggtgttgatatcgccaacaaagcaggaatatacggcattatcagcgatctggcggctcatggcattgcggtattgatgatctgcgatgaaattgaagaagcgtggtatcaaagccaccggattttggtaatgcaaaaaggtcagatcacccatagcttcctgcctgacagcagttctcaggccaggattgcggaggtggtaaatggc

SEQ ID NO: 1293 - protein, 494 aa, Escherichia coli
METFLSLRHINKTFHATRALRDVSLDFMSGEVHCLAGQNGCGKSTLIKIMSGVYRPDEGAEITLGGKNWSKLTPAASVAQGIQVIYQDLSLFPNLSVWENIAVNHYHHGLFVNRRRLREVAQAAMTSINVTLPLDTLVSELSIARCQLVAICRALAQDARLIVMDEPTASLTHQEVQGLLQVVHQLRERGICVVFVSHRLEEVMEVSDRISVLKDGELVGTFPAAEMTTKQLGFLMTGQEFEYQVRELWQGKSSTPVLEVRNLSRHGEYLNINLRVEAGEVVSIVGLLGAGRTELCLSLFGMTRPDAGEILINGQLVTLHSNQDAIRHGIGYVSEDRMSRGLVMAQSIEDNIISTVFHKVKDRFGFLSEAKVCDLVDRLIKALTIKVSDPHLPVNTLSGGNAQRVSIAKWLAIGPRLLILDSPTVGVDIANKAGIYGIISDLAAHGIAVLMICDEIEEAWYQSHRILVMQKGQITHSFLPDSSSQARIAEVVNG

SEQ ID NO: 1294 - DNA, 396 bp, Escherichia coli
agtgtggatgactcacgtcgtactacactggacctgatgaaaacctatcctgacttgaaagcggttgtctcctttggttcaaacggtccgattggcgcgggacgtgcagtgaaagagaaacgggcgaaaaataaagtcgcagtctatggcatgatgatcccttcacaggcggcatcactgattaaaagtggtgatatcaccgaagggattacttacgatccggcctctgcaggttacgcactcgcggccgtcgccagcacgttgctgaagggtgaagagatcaaacctggattagaaatgcagaatctgggtaaggccgacgtagatatggataagcgaattatccgtttccataaggtattactggtcaacaaagacaatatcgactcactttat

SEQ ID NO: 1295 - protein, 132 aa, Escherichia coli
SVDDSRRTTLDLMKTYPDLKAVVSFGSNGPIGAGRAVKEKRAKNKVAVYGMMIPSQAASLIKSGDITEGITYDPASAGYALAAVASTLLKGEEIKPGLEMQNLGKADVDMDKRIIRFHKVLLVNKDNIDSLY

SEQ ID NO: 1296 - DNA, 894 bp, Escherichia coli
cagggggcaggggaaatcgtcaccgcactgcgcgcgggggggctggacggggagaacatggatgtaatgctgcgtggggtgtgggtcacatcctcgcgtacagggtgggcagggggatgatattttcacgcaggccggcggccggcagtgcggactgggtaacaggtcggtggcaacctggcctctggggggggcgacgccgtattttactcgccggctcttcccggaagtcctgctggctgagccgaacctggcgggtgaaaacagcgtctggctgaacagctcccggcgcaggctgaccgccttttccacctgtggcgcggcactggcggcattgatggtcggaagctggcaccattattacaatcagaactggcagtctggcgttaacgtactggcacaagctaaagcctttatggacgtaccaccaccgcagggaacggatgaattcggcaatctgcaattgccattgcttaacccggtacgcgatgccaccctggcctatggtgattatcgcgatcacggttttctggcggatatgggattgtaccagggcgcccgcgtagggccgtatgtggagcaaacctacattcagcttcttgagcagcgttatctcccctcgttaatgaacggcctgatccgggatctaaacattgccccgccagagagcgaagaaaagctcgctgtgctgcgcgtagtgcgcatgatggaagacaaaagtgggcgcaacaacgaggcggtaaaacagtacatggcacggcgctggagcaatgaatttcacggccagcgcgatattcaggcgcaactgatggtgcatctggactatgcgctggagcacaccgactggcacgcgcagcgccaaagcagcgacagcgatgctgtcagccgctggac

SEQ ID NO: 1297 - DNA, 891 bp, Escherichia coli
cagggggcaggggaaatcgtcaccgcactgcgcgcgggggggctggacggggagaacatggatgtaatgctgcgtggggtgtgggtcacatcctcggtacagggtgggcagggggatgatattttcacgcaggccggcggccggcagtgcggactgggtaacaggtcggtggcaacctggcctctggggggggcgacgccgtattttactcgccggctcttcccggaagtcctgctggctgagccgaacctggcgggtgaaaacagcgtctggctgaacagctcccggcgcaggctgaccgccttttccacctgtggcgcggcactggcggcattgatggtcggaagctggcaccattattacaatcagaactggcagtctggcgttaacgtactggcacaagctaaagcctttatggacgtaccaccaccgcagggaacggatgaattcggcaatctgcaattgccattgcttaacccggtacgcgatgccaccctggcctatggtgattatcgcgatcacggttttctggcggatatgggattgtaccagggcgcccgcgtagggccgtatgtggagcaaacctacattcagcttcttgagcagcgttatctcccctcgttaatgaacggcctgatccgggatctaaacattgccccgccagagagcgaagaaaagctcgctgtgctgcgcgtagtgcgcatgatggaagacaaaagtgggcgcaacaacgaggcggtaaaacagtacatggcacggcgctggagcaatgaatttcacggccagcgcgatattcaggcgcaactgatggtgcatctggactatgcgctggagcacaccgactggcacgcgcagcgccaaagcagcgacagcgatgctgtcagccgctgg

SEQ ID NO: 1298 - protein, 297 aa, Escherichia coli
QGAGEIVTALRAGGLDGENMDVMLRGVWVTSSVQGGQGDDIFTQAGGRQCGLGNRSVATWPLGGATPYFTRRLFPEVLLAEPNLAGENSVWLNSSRRRLTAFSTCGAALAALMVGSWHHYYNQNWQSGVNVLAQAKAFMDVPPPQGTDEFGNLQLPLLNPVRDATLAYGDYRDHGFLADMGLYQGARVGPYVEQTYIQLLEQRYLPSLMNGLIRDLNIAPPESEEKLAVLRVVRMMEDKSGRNNEAVKQYMARRWSNEFHGQRDIQAQLMVHLDYALEHTDWHAQRQSSDSDAVSRW

SEQ ID NO: 1299 - DNA, 747 bp, Escherichia coli
aagacaagccatgcagatggcggcgtcaatttgtcgccatctgtatttatagcactaagcagcatgtggatattgaatttcaatacgttgaatatgcaatcctgcatgagccatcatggtgatcaatttatcgatactaaagatctggatcttacctctggcaagttcagatatgcgaggttgagtgacccctaaagcagacgctgcctgagcctggctaaacccttgttgttcaatccagttattaatgatcgttacaagttcggcacggatccgcatattttccgcttgttcaggggtgtcactcaccgcatcccacacactatcaaaggtttcaattttcatttttccgctcctgaacaagttctttatagcgtcgtttgtctaaatcaatatccgattgactggtagtctgtgttttcttttgaaaacaatgcaatacgtaaaccgcttcttcaaattttgcgatatacatgacgcgatagatcccatcagcatcgcgagtacaaatctctcgcacaccagggccgatagttgaaaaaggtttccagtcgtatgggtttaacccttgctggatcctgtcgagttgatagccaatttcctgtcgagacgattctggaaatgcgcgtaaatcgtcaagactggtatcaagaaaagccagcttttttctcattactccatccttagattatactaaattttgtataaatcaaatgcgcagtttgaacctgcgcatttgatgtttta

SEQ ID NO: 1300 - DNA, 288 bp, Escherichia coli
atgaaaattgaaacctttgatagtgtgtgggatgcggtgagtgacacccctgaacaagcggaaaatatgcggatccgtgccgaacttgtaacgatcattaataactggattgaacaacaagggtttagccaggctcaggcagcgtctgctttaggggtcactcaacctcgcatatctgaacttgccagaggtaagatccagatctttagtatcgataaattgatcaccatgatggctcatgcaggattgcatattcaacgtattgaaattcaatatccacatgctgct

SEQ ID NO: 1301 - protein, 96 aa, Escherichia coli
MKIETFDSVWDAVSDTPEQAENMRIRAELVTIINNWIEQQGFSQAQAASALGVTQPRISELARGKIQIFSIDKLITMMAHAGLHIQRIEIQYPHAA

SEQ ID NO: 1302 - DNA, 336 bp, Escherichia coli
atgagaaaaaagctggcttttcttgataccagtcttgacgatttacgcgcatttccagaatcgtctcgacaggaaattggctatcaactcgacaggatccagcaagggttaaacccatacgactggaaacctttttcaactatcggccctggtgtgcgagagatttgtactcgcgatgctgatgggatctatcgcgtcatgtatatcgcaaaatttgaagaagcggtttacgtattgcattgttttcaaaagaaaacacagactaccagtcaatcggatattgatttagacaaacgacgctataaagaacttgttcaggagcggaaaaatgaaaat

SEQ ID NO: 1303 - protein, 112 aa, Escherichia coli
MRKKLAFLDTSLDDLRAFPESSRQEIGYQLDRIQQGLNPYDWKPFSTIGPGVREICTRDADGIYRVMYIAKFEEAVYVLHCFQKKTQTTSQSDIDLDKRRYKELVQERKNEN

SEQ ID NO: 1304 - DNA, 886 bp, Escherichia coli
tggtgaaatcttcacatcgcccacaccagaccaaatgatcgaatgtgccaaagcggttgataatggttctggcgttctgtttttcatcaaaaattacactggcgatattctgaatttcgaaacggcagtcgagatgttacacgaagaaggcatcgccgttgggaccgtcattattgatgatgatgtagcggtaaaagatagcctgtatacagccggacgtcgcggtgttgcgggtacagtttttgttgaaaagattgtcggtgcggctgcacttcagggatataacctggggcagtgcgagcaacttggcaaagatgttaacaatgccacccgttcttttggcatcgcactgtcagcctgtacggttcccgccgcgggaaaaccctcatttgaactggctgataatgaaatcgaatttggtgtcgggatccacggtgaacccggcattgaacgccgcactttgcaagatctgaacactttaatcgacagcgtgatagcgcaattactggataataccccctggcgacgcacattacgccattgggatcgccatgcggggggatggattgacgcatcatcaatgaatgagtcattcgatcaaaatgccgaatatattgtgttaattaacggacttggcagcacgccctgaatcagagttatatggtgtagccagggtatttatgtgcgccgcacagcgccagggaattaaaatagcccgccagtgggtcgtaattatcggacatcattagatatggcccggattttcattagcctgcttgaatgtaccccagagtttttgcaactttgggatgccccggtcaatacgccagcgcttcgttggggatgttaatagggacattatttgaaattcaaaacaacattgtat

SEQ ID NO: 1305 - DNA, 840 bp, Escherichia coli
ggtgaaatcttcacatcgcccacaccagaccaaatgatcgaatgtgccaaagcggttgataatggttctggcgttctgtttttcatcaaaaattacactggcgatattctgaatttcgaaacggcagtcgagatgttacacgaagaaggcatcgccgttgggaccgtcattattgatgatgatgtagcggtaaaagatagcctgtatacagccggacgtcgcggtgttgcgggtacagtttttgttgaaaagattgtcggtgcggctgcacttcagggatataacctggggcagtgcgagcaacttggcaaagatgttaacaatgccacccgttcttttggcatcgcactgtcagcctgtacggttcccgccgcgggaaaaccctcatttgaactggctgataatgaaatcgaatttggtgtcgggatccacggtgaacccggcattgaacgccgcactttgcaagatctgaacactttaatcgacagcgtgatagcgcaattactggataataccccctggcgacgcacattacgccattgggatcgccatgcggggggatggattgacgcatcatcaatgaatgagtcattcgatcaaaatgccgaatatattgtgttaattaacggacttggcagcacgcctgaatcagagttatatggtgtagccagggtatttatgtgcgccgcacagcgccagggaattaatagcccgccagtgggtcgtaattatcggacatcattagatatggcccggattttcattagcctgcttgaatgtaccccagagtttttgcaactttgggatgccccggtcaatacgccagcgcttcgttgggga

SEQ ID NO: 1306 - protein, 280 aa, Escherichia coli
GEIFTSPTPDQMIECAKAVDNGSGVLFFIKNYTGDILNFETAVEMLHEEGIAVGTVIIDDDVAVKDSLYTAGRRGVAGTVFVEKIVGAAALQGYNLGQCEQLGKDVNNATRSFGIALSACTVPAAGKPSFELADNEIEFGVGIHGEPGIERRTLQDLNTLIDSVIAQLLDNTPWRRTLRHWDRHAGGWIDASSMNESFDQNAEYIVLINGLGSTPESELYGVARVFMCAAQRQGINSPPVGRNYRTSLDMARIFISLLECTPEFLQLWDAPVNTPALRWG

SEQ ID NO: 1307 - DNA, 4892 bp, Escherichia coli
cgatgatgacttacaggcgattgactgctgacgtctgttgccagtttttccagcatttcattcatggaacataacgtaatgccacactcgctaaggccggtaagcgtggcggaaagatgcgccgcgtagtcgctgtgaacagtaccgcgaagcgcgtttaattcgctgtgcggatcgcagtaataacgcagtgccagtaccggaatacccgccagtagcgcatcgtgaaccctttgcgctaccgggctttgcagcgtaccgttgacaatatctacagccagcgggtaactcaaaaacggcagcaataacgctttatagggcgttgaaggcaatttgtgttgccatgttttagcgggtatcacgtcaccaatttgctgccaccgttcgctatcactgattgtttcatccagcgccagatgcaaccgttcgccacaacgagccaaccgctgatgaatcagatcccgatagccatccgcagatgtcaccatgaccagtaccgcaggttgcagccgctggaggatcaggttgacgatggtgtcgatctgttgttcggtcatgatggcctcccttagcgaatcagtgttacctgcgccccgtttttcagtccggcagcattggcttcttccgtatcgatatgcagttcaagggcaaaatcattgcgcacccgtaccaccacttcatcgaacgttaactggcgttcaccatgactgcgaacactcaccttctgcccattgctgacattcaacagacgagcatcctggggagacatatgaatatgccgccaggcgcaaatgacttgtgaatgcaactcaacatgacctttcggccccaccaacagtgcgtcaccggcattttccagttgcccggattcacgcactggcgctttaatgccgagagtaaaacaatcggcacgtgagatttccagctggcttgtcgggcgaaccggtccaagtacgcggacgtgagtcagagaacctttcgggccgacaaccgttacacactcttcagcggcgaattgcccaggctggcgcaacggcttaaagggcgtaagttggtagccaacaccaaaaagtgcttcaacatcctgctgcgacagatgcacatgacgattagaaacaccgaccggaatagtgggagcagtatcgatcagtcgcgtggtgattttttcctgtagcagtgcgtcaatcatgctttcttccctttcttatgcccgtggcttttcacttccacgatgggggcttgcacttctttctcaggtacaggcattgcagtttcagtatctgtagaaacttcagcggtttcctcgcagacagccatttctgcaactgtcggcagctctgcatgaggtttctggcctgattcgacacgtggcggatgacctttcaggttgctgagagcctcaaccacgcagcgttccgggcgagcgatcaccagtgatttggcctgatggtcggttgcggatgccacagcaataccacgttcaatggccgtgtaaactgcgctgatttccccatcaaaacagacggttaccagcccggaacctactttgcgataaccaatacaggtcaccccggctgctttgcaggcggcatctacggcctggattgcggctacaagaccacgtgtttcaattacgcctaaactgttcatttacggctcctttaatgacgaactaagcgaatatcaaaatcgaactgggcgaaaaacgcctccagtttgtccagctcttccacgctgtatgacgggtcttcaacaatcgggtagggcatctccagtcgttcatactttttgcgccccagctggtggtacggcagtatatcgattcggcgaatattgccgcgtttggccagtttctggacgtagtcgatagcgccggtaatcgcttcccacgaatcgttataaccacgaatcagcggcatacgaacaatcacgttggcccccgaatccaccagccactccagattgcgacgcacgccttcgttgccaattccgaacagcgttttatggtgattgctatcgatctgtttgatatcgaacaggaaggtgtcggtgaccggagccagcttctgatagtttgcaagcggggttgtaccctgggtctcgacggcggtgttgatcatcatctttttgcattcactgaacagggcaacggcaaaatcagtttgcaagctcatctcaccgcccccaatagtgacaccaccgccggaggagacgtaaaagtcatagtcctgcatgatgatctccatcaattcactgaccgtgacatctttacccatgatatccagtgcattttgggtgcaaatttcttcacacttgcgacaaccaatgcagtctttattacggttgacgaaatgcttcatttctccgttgacttccgcgcggtagtggatccccgcagggcatacattgacgcagtcgccgcagttgatgcatttatcctgagagaacatcacctgaaactggctgcttaacccttccgggttggcacaccacgggcagcgaagattgcagcctttaaaaaaaatcagtgtgcggataccgtcaccgtcgtagatcgaatatttctggatattgaaaattcgtccgcttaattctttatttgcgctcacgcttgcctcctgaaaatgtcggacatccttgtccggttgcgatccgtcttatcagaacttctcaatcaccgtacggctgatgatttcgtcctgaacttccttgcacaattccacgaagtaggcgctgtaaccggctacacggacgatcaaatcacggtatttttccggttcctgttgtgcttttttcagtacttcgttatcgacgtagctgaactgcatctgaccgttgccgagaattgatgctgtacgcagtagagttatcaggccgtggcgtccttcaggtgtatcaagtaaccctttgaggaatttgaagttatgcaccatgccgatattcatggtttcaacgttcattttgctcacagacttgataatcgccgttgggccatgcttatccgccccttgagtcgggctgatcccgtcagaaagcggcatccacgccagacgaccatttggtgtggcattggtcagctcaccaatcggcgtattgttggagatcgacaacgtaccgtggctgagggtggagtagagcatcttgtacttgcggcattcacgttcagtccactcggtgatatccagagcgtactggtcaacgtagttatcgtcgttgccgtatttcggtgcgttcagacagtcgcgacgcaagccttcataaccttcaaagtttgccagcagagcgtcccgtatctgttcaagggtatatttcttatcttcgtaaaccagtttgcggatggccgccattgaatcgacgtaggtagccagaccagagaaaatcagcccaggtccgtggtttaccattgcgccaccggcagagacgtctttgcctttttccatgcagccttcaaccagtagcgacatcagcggttttggtgccacgtcccggtgcacacgctggctgatgaccgtaccgatggcggacaagcgtatgatatgagcaacttgttttttcaccgcggcatcaaaatcttcgaatgtgcgcagatctttcagatcgcccgtgtccagcccctgatagctatcaaacagcaccatacgaccacggttgaggacaaactcgatggcaattggccattgggtgtagccggtggaagtccactggtaaatacgacctgatttttgtggttccacgcagcccatcaggcagtaatcacgggcatcttcaaagtcaaagcctttgcgcagcatcattttgatatgggagtcatcgaagtgacaggctgggaagcccatccccgctttcaccacatcgacaattttttccatatatttttgcggcgactggttatggatacggcaagccagtgatggctgatacactttcacaaaacggactgcatccataatcagataggtgagatcgttgcaggcatcgccaccgctacgtttttgaccaccgacagtcaggttgataaatggctgataacccgcaaaatatttcgctcccagttcgctggacatccacatcagctcggcacatttgatgataaatgcctgcatcagctccagtgcaccttcatgagtcaggcgaccttcacggatatctgcttcaaacatcgggtagcagtactggtcaacacgcccaagtgacaggcctgtctggttctcttcaatctcaaacagtgactctaccgtccagatactttgcagcgcttcctgcaaggttttcggcggattcgccggaacgttctggttaacttctgcgatagtcagtagctctgctcgacgctgggcgttctgttcaacggcagccagttcacgggcacgggcggcaatacgatgcgcatagttgatcaccccttcacaggtgtcgatcgctgctttgtagtagtaaatgcgatcgatatcttccgggttttccatgctcagttcggcaagatgcgcctcggcatcggctttgatgccattcatccctttggtaaacagcagcacatcgtagcccggacaggtatcacccccaccgttaacctgatgataggagaggtcgctgacgaatgtttcgccactgaacgaccaaacgccagcttcgcggtattgtgcttcacaaatttcatccagcgagcgcccctcccagaacggtacaatctcttcgcgaatggtttttttatcttcttcgctgatttcaaacggatcctgcgggcgagtactcatggtatcgagttcgtcacgcacccagcgccaggcaatatcaggtgaaaatgcgccagcacgcggtttaccgcaaggatgaccgacgatcagctcatcgtcctgaatcaaaatcggcgcagtttcacaggcgtgacggaa

SEQ ID NO: 1308 - DNA, 555 bp, Escherichia coli
atgaccgaacaacagatcgacaccatcgtcaacctgatcctccagcggctgcaacctgcggtactggtcatggtgacatctgcggatggctatcgggatctgattcatcagcggttggctcgttgtggcgaacggttgcatctggcgctggatgaaacaatcagtgatagcgaacggtggcagcaaattggtgacgtgatacccgctaaaacatggcaacacaaattgccttcaacgccctataaagcgttattgctgccgtttttgagttacccgctggctgtagatattgtcaacggtacgctgcaaagcccggtagcgcaaagggttcacgatgcgctactggcgggtattccggtactggcactgcgttattactgcgatccgcacagcgaattaaacgcgcttcgcggtactgttcacagcgactacgcggcgcatctttccgccacgcttaccggccttagcgagtgtggcattacgttatgttccatgaatgaaatgctggaaaaactggcaacagacgtcagcagtcaatcgcctgtaagtcatcat

SEQ ID NO: 1309 - protein, 185 aa, Escherichia coli
MTEQQIDTIVNLILQRLQPAVLVMVTSADGYRDLIHQRLARCGERLHLALDETISDSERWQQIGDVIPAKTWQHKLPSTPYKALLLPFLSYPLAVDIVNGTLQSPVAQRVHDALLAGIPVLALRYYCDPHSELNALRGTVHSDYAAHLSATLTGLSECGITLCSMNEMLEKLATDVSSQSPVSHH

SEQ ID NO: 1310 - DNA, 618 bp, Escherichia coli
atgattgacgcactgctacaggaaaaaatcaccacgcgactgatcgatactgctcccactattccggtcggtgtttctaatcgtcatgtgcatctgtcgcagcaggatgttgaagcactttttggtgttggctaccaacttacgccctttaagccgttgcgccagcctgggcaattcgccgctgaagagtgtgtaacggttgtcggcccgaaaggttctctgactcacgtccgcgtacttggaccggttcgcccgacaagccagctggaaatctcacgtgccgattgttttactctcggcattaaagcgccagtgcgtgaatccgggcaactggaaaatgccggtgacgcactgttggtggggccgaaaggtcatgttgagttgcattcacaagtcatttgcgcctggcggcatattcatatgtctccccaggatgctcgtctgttgaatgtcagcaatgggcagaaggtgagtgttcgcagtcatggtgaacgccagttaacgttcgatgaagtggtggtacgggtgcgcaatgattttgcccttgaactgcatatcgatacggaagaagccaatgctgccggactgaaaaacggggcgcaggtaacactgattcgc

SEQ ID NO: 1311 - protein, 206 aa, Escherichia coli
MIDALLQEKITTRLIDTAPTIPVGVSNRHVHLSQQDVEALFGVGYQLTPFKPLRQPGQFAAEECVTVVGPKGSLTHVRVLGPVRPTSQLEISRADCFTLGIKAPVRESGQLENAGDALLVGPKGHVELHSQVICAWRHIHMSPQDARLLNVSNGQKVSVRSHGERQLTFDEVVVRVRNDFALELHIDTEEANAAGLKNGAQVTLIR

SEQ ID NO: 1312 - DNA, 462 bp, Escherichia coli
atgaacagtttaggcgtaattgaaacacgtggtcttgtagccgcaatccaggccgtagatgccgcctgcaaagcagccggggtgacctgtattggttatcgcaaagtaggttccgggctggtaaccgtctgttttgatggggaaatcagcgcagtttacacggccattgaacgtggtattgctgtggcatccgcaaccgaccatcaggccaaatcactggtgatcgctcgcccggaacgctgcgtggttgaggctctcagcaacctgaaaggtcatccgccacgtgtcgaatcaggccagaaacctcatgcagagctgccgacagttgcagaaatggctgtctgcgaggaaaccgctgaagtttctacagatactgaaactgcaatgcctgtacctgagaaagaagtgcaagcccccatcgtggaagtgaaaagccacgggcataagaaagggaagaaagca

SEQ ID NO: 1313 - protein, 154 aa, Escherichia coli
MNSLGVIETRGLVAAIQAVDAACKAAGVTCIGYRKVGSGLVTVCFDGEISAVYTAIERGIAVASATDHQAKSLVIARPERCVVEALSNLKGHPPRVESGQKPHAELPTVAEMAVCEETAEVSTDTETAMPVPEKEVQAPIVEVKSHGHKKGKKA

SEQ ID NO: 1314 - DNA, 945 bp, Escherichia coli
gtgagcgcaaataaagaattaagcggacgaattttcaatatccagaaatattcgatctacgacggtgacggtatccgcacactgattttttttaaaggctgcaatcttcgctgcccgtggtgtgccaacccggaagggttaagcagccagtttcaggtgatgttctctcaggataaatgcatcaactgcggcgactgcgtcaatgtatgccctgcggggatccactaccgcgcggaagtcaacggagaaatgaagcatttcgtcaaccgtaataaagactgcattggttgtcgcaagtgtgaagaaatttgcacccaaaatgcactggatatcatgggtaaagatgtcacggtcagtgaattgatggagatcatcatgcaggactatgacttttacgtctcctccggcggtggtgtcactattgggggcggtgagatgagcttgcaaactgattttgccgttgccctgttcagtgaatgcaaaaagatgatgatcaacaccgccgtcgagacccagggtacaaccccgcttgcaaactatcagaagctggctccggtcaccgacaccttcctgttcgatatcaaacagatcgatagcaatcaccataaaacgctgttcggaattggcaacgaaggcgtgcgtcgcaatctggagtggctggtggattcgggggccaacgtgattgttcgtatgccgctgattcgtggttataacgattcgtgggaagcgattaccggcgctatcgactacgtccagaaactggccaaacgcggcaatattcgccgaatcgatatactgccgtaccaccagctggggcgcaaaaagtatgaacgactggagatgccctacccgattgttgaagacccgtcatacagcgtggaagagctggacaaactggaggcgtttttcgcccagttcgattttgatattcgcttagttcgtcat

SEQ ID NO: 1315 - protein, 315 aa, Escherichia coli
VSANKELSGRIFNIQKYSIYDGDGIRTLIFFKGCNLRCPWCANPEGLSSQFQVMFSQDKCINCGDCVNVCPAGIHYRAEVNGEMKHFVNRNKDCIGCRKCEEICTQNALDIMGKDVTVSELMEIIMQDYDFYVSSGGGVTIGGGEMSLQTDFAVALFSECKKMMINTAVETQGTTPLANYQKLAPVTDTFLFDIKQIDSNHHKTLFGIGNEGVRRNLEWLVDSGANVIVRMPLIRGYNDSWEAITGAIDYVQKLAKRGNIRRIDILPYHQLGRKKYERLEMPYPIVEDPSYSVEELDKLEAFFAQFDFDIRLVRH

SEQ ID NO: 1316 - DNA, 2091 bp, Escherichia coli
atgagtactcgcccgcaggatccgtttgaaatcagcgaagaagataaaaaaaccattcgcgaagagattgtaccgttctgggaggggcgctcgctggatgaaatttgtgaagcacaataccgcgaagctggcgtttggtcgttcagtggcgaaacattcgtcagcgacctctcctatcatcaggttaacggtgggggtgatacctgtccgggctacgatgtgctgctgtttaccaaagggatgaatggcatcaaagccgatgccgaggcgcatcttgccgaactgagcatggaaaacccggaagatatcgatcgcatttactactacaaagcagcgatcgacacctgtgaaggggtgatcaactatgcgcatcgtattgccgcccgtgcccgtgaactggctgccgttgaacagaacgcccagcgtcgagcagagctactgactatcgcagaagttaaccagaacgttccggcgaatccgccgaaaaccttgcaggaagcgctgcaaagtatctggacggtagagtcactgtttgagattgaagagaaccagacaggcctgtcacttgggcgtgttgaccagtactgctacccgatgtttgaagcagatatccgtgaaggtcgcctgactcatgaaggtgcactggagctgatgcaggcatttatcatcaaatgtgccgagctgatgtggatgtccagcgaactgggagcgaaatattttgcgggttatcagccatttatcaacctgactgtcggtggtcaaaaacgtagcggtggcgatgcctgcaacgatctcacctatctgattatggatgcagtccgttttgtgaaagtgtatcagccatcactggcttgccgtatccataaccagtcgccgcaaaaatatatggaaaaaattgtcgatgtggtgaaagcggggatgggcttcccagcctgtcacttcgatgactcccatatcaaaatgatgctgcgcaaaggctttgactttgaagatgcccgtgattactgcctgatgggctgcgtggaaccacaaaaatcaggtcgtatttaccagtggacttccaccggctacacccaatggccaattgccatcgagtttgtcctcaaccgtggtcgtatggtgctgtttgatagctatcaggggctggacacgggcgatctgaaagatctgcgcacattcgaagattttgatgccgcggtgaaaaaacaagttgctcatatcatacgcttgtccgccatcggtacggtcatcagccagcgtgtgcaccgggacgtggcaccaaaaccgctgatgtcgctactggttgaaggctgcatggaaaaaggcaaagacgtctctgccggtggcgcaatggtaaaccacggacctgggctgattttctctggtctggctacctacgtcgattcaatggcggccatccgcaaactggtttacgaagataagaaatatacccttgaacagatacgggacgctctgctggcaaactttgaaggttatgaaggcttgcgtcgcgactgtctgaacgcaccgaaatacggcaacgacgataactacgttgaccagtacgctctggatatcaccgagtggactgaacgtgaatgccgcaagtacaagatgctctactccaccctcagccacggtacgttgtcgatctccaacaatacgccgattggtgagctgaccaatgccacaccaaatggtcgtctggcgtggatgccgctttctgacgggatcagcccgactcaaggggcggataagcatggcccaacggcgattatcaagtctgtgagcaaaatgaacgttgaaaccatgaatatcggcatggtgcataacttcaaattcctcaaagggttacttgatacacctgaaggacgccacggcctgataactctactgcgtacagcatcaattctcggcaacggtcagatgcagttcagctacgtcgataacgaagtactgaaaaaagcacaacaggaaccggaaaaataccgtgatttgatcgtccgtgtagccggttacagcgcctacttcgtggaattgtgcaaggaagttcaggacgaaatcatcagccgtacggtgattgagaagttc

SEQ ID NO: 1317 - protein, 743 aa, Escherichia coli
FRHACETAPILIQDDELIVGHPCGKPRAGAFSPDIAWRWVRDELDTMSTRPQDPFEISEEDKKTIREEIVPFWEGRSLDEICEAQYREAGVWSFSGETFVSDLSYHQVNGGGDTCPGYDVLLFTKGMNGIKADAEAHLAELSMENPEDIDRIYYYKAAIDTCEGVINYAHRIAARARELAAVEQNAQRRAELLTIAEVNQNVPANPPKTLQEALQSIWTVESLFEIEENQTGLSLGRVDQYCYPMFEADIREGRLTHEGALELMQAFIIKCAELMWMSSELGAKYFAGYQPFINLTVGGQKRSGGDACNDLTYLIMDAVRFVKVYQPSLACRIHNQSPQKYMEKIVDVVKAGMGFPACHFDDSHIKMMLRKGFDFEDARDYCLMGCVEPQKSGRIYQWTSTGYTQWPIAIEFVLNRGRMVLFDSYQGLDTGDLKDLRTFEDFDAAVKKQVAHIIRLSAIGTVISQRVHRDVAPKPLMSLLVEGCMEKGKDVSAGGAMVNHGPGLIFSGLATYVDSMAAIRKLVYEDKKYTLEQIRDALLANFEGYEGLRRDCLNAPKYGNDDNYVDQYALDITEWTERECRKYKMLYSTLSHGTLSISNNTPIGELTNATPNGRLAWMPLSDGISPTQGADKHGPTAIIKSVSKMNVETMNIGMVHNFKFLKGLLDTPEGRHGLITLLRTASILGNGQMQFSYVDNEVLKKAQQEPEKYRDLIVRVAGYSAYFVELCKEVQDEIISRTVIEKF

SEQ ID NO: 1318 - DNA, 6927 bp, Escherichia coli
ggggttgtgcggcttgaatgtaatgcagatgttacgttaatcattgcaataaaaaaactgtaattttattttcactttgaaaaacctgttcttttttaacttttcggtttcatttaattatcatatagctgtctgaccttattatttcttttaactaatccataatttttcagaataaatgatcgtgcattggtagattgctgtgcaatcagttctggcttaccaacatatgacatgattttttgagataataactgacaatctctaatttcaaacaaacaaccattatagccatcttctattaagctattattacctggaatattagtgactatacatggaagtccacagctcaatgcttctaaaattgctaatggcataccctcccaaagagaaggtaatataaaaagatcattaacttttaaaatattaacaatgttatctgaccatccatgaaaaattatacgtccatcttgccgtttgaacctgctttctaactgttcttttagttcaccatctcctacaagtgtcagcttaacattaacattttcattcagcagtttttcaacagcaagcaataatgtctcaggatctttttgcttggataatctaccaaccattactagattcaaggtgctactataaattttattttctaaaggagaaaacttatcagtgtctactccattaggaattaaaaaaactttatcccgcttgaattttaatttgtttattgctatatattcatcatctacattcaagacgattaacttatccgtaaagaactttgctatccattccatgaaaaaataaaggtaataactttttttactagatgcggctggaaaagaaaaaccatgtacagtgtggatcacctttccaacacgtgctaatttggcagcaactcgccccaaaatacctgtttttgaagaatgtgtatgcacaatgtcaaatttttctttttttatgaacttataaagcttgaacaatgctttaaaatcattctttacggtaatttctctcgtaagttcggggatacaatgacaatcgacatcatattccagcaatgcttttgttagtggacctttttttgagcaaactagtgtataatcataatcagtatataacgcactaatttcgtttaatgttaccctttgaacgccacttaagagtgggagtaattgtaagtgcaaaactttagttgttctagctgtcatataatagtttaccgtttaccaaacgtaccactcataattaatatgagtgtcagaaaagattatcatttattaacattaaatcttgatttattataaataattaattcactggatcaatttttaatatccataaacatctcaaaaactcttcattctcaaaacagttttacttctctgttcccagcccaatcgtttcggcgcattaaaaacgtcaatatatttatagaaagcatcttaaaataaataccaatcatcgttagctatgatggtatttttgaaatacaaaaatctcaattgagattgaattaaattcaaacaaaagacacgttccaaatataaatctacctttcatgttttgagcaaattatagttccatagagttcttgccactgcataataatagtatctattgagaaattttttaaaatacgctcacgattccgaaaaccaatgtgatcacgtatctggctcaaagacaatttttcaattttgcttgcaagttgtgttgaatcagatatgggtacaagaaaatcatcgtcaccaataacttctcttactccccctgaatccgtgccaacaacaattcgctcacatgacatagcttctgccacgactaatccaaatccttcccaacgagaagagagaacaaaaatatcacatgcagaaaaatagggagcaatattttttttaactcccaacaaggacaccctattagataattgcaatttttttataagcatattaatttcgtcacgcaattcaccatcaccaataataataagtttaaagtgttcaggaagcagagtcattgcattcaataaattaggataatctttagctaacgttaaacgacctgcagcaagtaataatatatcatcattttttatattaataccgtctcgaatttccctccttgccaataaatcaaatttaaatttattggtatctatcccattatacatagtaattgctttagcgggattaaaggcttttatccgtaaaaactcatccactgcttctttgctaacatttgtacaacaatcacttaaacaatcggttattctatatgtgagcattctgaaatacccaccttcatttttattatgtgcagttgatataataccaggtctgtttttgattccaattacagacaatctagtgataatgtttgcatgaaacatatgactgtgtacaatgtctggtttgaaattagctataacatctctaattctgacacaaccttttataactccagaaatgttttttgacatatttacattaatgacattaacattattttcgctaggaaagactttattattagacatatgtccaagtgaaataatctttacatggtgcccgcttaaacttaatttatcagctaaaagacaaacctgcttctcagcacctccaaggcctaaacctgtaatgacaaatagtattttcattttattttctcataataacaacattgcaaatatctaattagcatctttgttttttttatataagttttctctcgttttctttgatctttgtaataaatcttaaacccctttgggtattttttaagctggttatggaaatttttagaaagaccatcatcaagatactcacaaagatatataactttgcttatgttaaatcgaatcttcgccttgtcagttattttattccaaatatataattctggaacaaatttttcatcttctatacgggggaatggattttttaccaaactttcttttttaaaacaatatgcaacatcaccatttattaaattgctaatctcagtcgcatttaaatagtatatatgttctgaagaattatttaaatcattaccaataatccccccttttatatatgcttttctaaaaccgactccgctgaaactttccttctcagataagcaatcatgtattgattctttaattaattttatggcatcgggagttagtgcatcatcactgtcaacaataaagatataatcgcctctacaagctttaacaccagcgtttaaagccatgggcttaccattattttcctgatagcaataaatcaagtcaaaatcacatttttttctaaaatcttctacaagtaccgctgttgcatctatactaccatcatcaattattatccactcaaaatctttatcagtttgtaatataagagaattgaatagccttgataaagtatgttgccgattaaaagtaggtgtaagtattgaaatcattcgctaaattttctccgtattaagaattttaataataatttagttctactgttatttaatctaaacccacctcgccataacttaaaaaaatctgtaaatttattatttgattcacaaaatgaaataaaatccaaaaaaacttttttattcgtctctgataagatagagctgttacattcaaaaaaagatttttttacctgataatgttttcgtgataaaagatagtttactggtgatttaaatttagaagtcaatccattgcggaatgttttgataccagttaccgcattcgtgtgctgtctatataacataaggtatttcgggagaaaataaactttaccaagagcgtatgcagctaatgttgtgatatcgtcatgtagatatacaaatcctcgataattcagaagaaatttggtcattgcacgattgaacataatagaacatccttggtatccaccattaaaaaaaagaaaatcctttaattgatcagcatgattgttagatatcccagaaaaatcgattgtaccctcaccatccatataagcatagccatcagcataaactagcgaaggcgcatctgatacattcaatttaatttcatttgcatactttactaattcaaatattttgttttctaaccaaatatcatcttggtcacaataaattgtataatctgtctcgctgtactttatcagcgataaaaaattttttcctgcaccttgacctttcaaattatcatcaactagccgaattctggagtcagatttttggaagttttttattatagatatagtattgtctgtagacccatcatcctgaataaataaccgccagttagaaaatgtttgttgttgtagtgacaaaatctgatttttgatgaaggcctcgccattgtaggtggccattagaatggttactgtactggtttgcatattactgtaaatcgccatagtaagatggtacataatactaacttcacatttccagctaaattcgttactagcgtttcagcgaagaaagccgttgcactgctaactgaaaacaatgcgtaaatcagtaatgcctgtgtattatttccacgaacaccggccgtgtataaactcacatatattagtccgtataatactgctccaaatatgatgccagtataaccaaaatcctggtaaaatggttgaagtgcagtatatacatttgttggtacaggaacgtatgaatagtcaagaatagtatttactggcaattctttaataaggccaattttattagttatagcatatatgaatctaaacgtatactcaccaaaatgactactatttacttcattcaactggcctaaagcaattattggtgaataaatatagagccctaaaatagataaaaatgttgagtggtcattctcagccatacgtgtaaaatgcaaagttaaagctaatataattatcaacaatgtaaactttattgttttttttacttttaatctatgtttgaagtcataaataattaaatatgtcaatattggcgttaatattgaaaattttcccattgtgccaatacaatacaaaaacatccagaaataaatggagtatttatttaatttggaagtttttgttagacaaacaattgcgaacatagccatcattagaggatatacagcaggcattaagataaattttttacccgtatagccctccaatgtatttgcaagacgtaaattgagaaagaatccatctgctccccccataccaaccatatatatttcgaaaatggtatataatgaaattgggatgacaatgatccaatattttttacattcatatttaatatgtgaaagaccataataaacatttatattttcacgtttataattaaccagttcccctatgaaataaaatataaaaataactgtaaaccaaatcaacaaagagtaaaagcttctttcattaaactcgtaaaattgatcgtaattacttatcccgacaattaaagttagtaaccatggtaaaaaatgcaaaggtaatggagatgtgatcctactttttgtgccgagaagagaaaacattatggctataactagaagaagagttaaagttaatatatatatcattataaattgtcacctacccaaataaagccatgagttattaacttgcattttgaattttatttattaatatacttaccgtccaaaagacttaatgctatataatctactatcatcctcactgaccacgcaatacccgcgccaacaaccccatgtgcttttatgaggtaaaataaaagtaataaataaggaaacaactctaagagatgaacaaatgcagttatcttagcatgacctcgggattgaatactggcaaatggtacttgtgccaatccattaaaaataaagccaatcagtaatattgataataccaaaccaggctcaccaaaaaatgatgcccccatccataaaaccattatcttctctgaaaataacacgccaatacaaaaaataggggtgatgattattaaaagtgaaattgtaattaatcttttcgttttatatctttcagcggaattatttgcattagctaatcttggaaataaggctcttgaaaacgcacctggaattatactaagccgagaaataatttctgatggtgcagtataaaaagcaacattagcagccccaagttgatttgaaacaataaacctatcaaaatatgatagcacagggctgatgatattacttactgtaatccaaccaccgaacataaacaatcttttaattgttggtatatcgattgttagtttagctttaagcactttatcgtgacaaattataaaagccaaaataaaacataaaaaccttgctagaactaagcctattatcgcatacatcaaagagggtttaataagtataaataatgccggtgagattgctaatatcactcccgtaattgatttgtagatattaagtaaaccaaatctttcttcaccttctaaaattgacaaccatatttgagtaatcaaaaataatggtatggatgctgcgagaattttaagcgagacacttacattatgaaaaaaagtctcactaatgttcagtagcaatgcgatatgaccactaaaaaaaaataataagagtgaggcggccaaactcaaataaataattacaactgtcgctgaagaaataattttcaacttattttcttcattatctttttcaattgcgacttctcgtatcactgcgcgagtaaggcctgcatcaaaaatgcttgcataacccacaacagctaatgccaaagtgaatacaccaaataattctgggcctaattttcgccccataatacccaaagctggtagtgtcacaatagctgtaagtacatacccgcaaaggttccaaaaactgtttttgattaaactcatttaaaatactcattactcgatattttcttaaatgttggcgcatttaaatctttttcttcaggcacataa

SEQ ID NO: 1319 - DNA, 1101 bp, Escherichia coli
atgacagctagaacaactaaagttttgcacttacaattactcccactcttaagtggcgttcaaagggtaacattaaacgaaattagtgcgttatatactgattatgattatacactagtttgctcaaaaaaaggtccactaacaaaagcattgctggaatatgatgtcgattgtcattgtatccccgaacttacgagagaaattaccgtaaagaatgattttaaagcattgttcaagctttataagttcataaaaaaagaaaaatttgacattgtgcatacacattcttcaaaaacaggtattttggggcgagttgctgccaaattagcacgtgttggaaaggtgatccacactgtacatggtttttcttttccagccgcatctagtaaaaaaagttattacctttattttttcatggaatggatagcaaagttctttacggataagttaatcgtcttgaatgtagatgatgaatatatagcaataaacaaattaaaattcaagcgggataaagtttttttaattcctaatggagtagacactgataagttttctcctttagaaaataaaatttatagtagcaccttgaatctagtaatggttggtagattatccaagcaaaaagatcctgagacattattgcttgctgttgaaaaactgctgaatgaaaatgttaatgttaagctgacacttgtaggagatggtgaactaaaagaacagttagaaagcaggttcaaacggcaagatggacgtataatttttcatggatggtcagataacattgttaatattttaaaagttaatgatctttttatattaccttctctttgggagggtatgccattagcaattttagaagcattgagctgtggacttccatgtatagtcactaatattccaggtaataatagcttaatagaagatggctataatggttgtttgtttgaaattagagattgtcagttattatctcaaaaaatcatgtcatatgttggtaagccagaactgattgcacagcaatctaccaatgcacgatcatttattctgaaaaattatggattagttaaaagaaataataaggtcagacagctatatgataat

SEQ ID NO: 1320 - protein, 367 aa, Escherichia coli
MTARTTKVLHLQLLPLLSGVQRVTLNEISALYTDYDYTLVCSKKGPLTKALLEYDVDCHCIPELTREITVKNDFKALFKLYKFIKKEKFDIVHTHSSKTGILGRVAAKLARVGKVIHTVHGFSFPAASSKKSYYLYFFMEWIAKFFTDKLIVLNVDDEYIAINKLKFKRDKVFLIPNGVDTDKFSPLENKIYSSTLNLVMVGRLSKQKDPETLLLAVEKLLNENVNVKLTLVGDGELKEQLESRFKRQDGRIIFHGWSDNIVNILKVNDLFILPSLWEGMPLAILEALSCGLPCIVTNIPGNNSLIEDGYNGCLFEIRDCQLLSQKIMSYVGKPELIAQQSTNARSFILKNYGLVKRNNKVRQLYDN

SEQ ID NO: 1321 - DNA, 1104 bp, Escherichia coli
atgaaaatactatttgtcattacaggtttaggccttggaggtgctgagaagcaggtttgtcttttagctgataaattaagtttaagcgggcaccatgtaaagattatttcacttggacatatgtctaataataaagtctttcctagcgaaaataatgttaatgtcattaatgtaaatatgtcaaaaaacatttctggagttataaaaggttgtgtcagaattagagatgttatagctaatttcaaaccagacattgtacacagtcatatgtttcatgcaaacattatcactagattgtctgtaattggaatcaaaaacagacctggtattatatcaactgcacataataaaaatgaaggtgggtatttcagaatgctcacatatagaataaccgattgtttaagtgattgttgtacaaatgttagcaaagaagcagtggatgagtttttacggataaaagcctttaatcccgctaaagcaattactatgtataatgggatagataccaataaatttaaatttgatttattggcaaggagggaaattcgagacggtattaatataaaaaatgatgatatattattacttgctgcaggtcgtttaacgttagctaaagattatcctaatttattgaatgcaatgactctgcttcctgaacactttaaacttattattattggtgatggtgaattgcgtgacgaaattaatatgcttataaaaaaattgcaattatctaatagggtgtccttgttgggagttaaaaaaaatattgctccctatttttctgcatgtgatatttttgttctctcttctcgttgggaaggatttggattagtcgtggcagaagctatgtcatgtgagcgaattgttgttggcacggattcagggggagtaagagaagttattggtgacgatgattttcttgtacccatatctgattcaacacaacttgcaagcaaaattgaaaaattgtctttgagccagatacgtgatcacattggttttcggaatcgtgagcgtattttaaaaaatttctcaatagatactattattatgcagtggcaagaactctatggaactataatttgctcaaaacatgaaagg

SEQ ID NO: 1322 - protein, 368 aa, Escherichia coli
MKILFVITGLGLGGAEKQVCLLADKLSLSGHHVKIISLGHMSNNKVFPSENNVNVINVNMSKNISGVIKGCVRIRDVIANFKPDIVHSHMFHANIITRLSVIGIKNRPGIISTAHNKNEGGYFRMLTYRITDCLSDCCTNVSKEAVDEFLRIKAFNPAKAITMYNGIDTNKFKFDLLARREIRDGINIKNDDILLLAAGRLTLAKDYPNLLNAMTLLPEHFKLIIIGDGELRDEINMLIKKLQLSNRVSLLGVKKNIAPYFSACDIFVLSSRWEGFGLVVAEAMSCERIVVGTDSGGVREVIGDDDFLVPISDSTQLASKIEKLSLSQIRDHIGFRNRERILKNFSIDTIIMQWQELYGTIICSKHER

SEQ ID NO: 1323 - DNA, 786 bp, Escherichia coli
atgatttcaatacttacacctacttttaatcggcaacatactttatcaaggctattcaattctcttatattacaaactgataaagattttgagtggataataattgatgatggtagtatagatgcaacagcggtacttgtagaagattttagaaaaaaatgtgattttgacttgatttattgctatcaggaaaataatggtaagcccatggctttaaacgctggtgttaaagcttgtagaggcgattatatctttattgttgacagtgatgatgcactaactcccgatgccataaaattaattaaagaatcaatacatgattgcttatctgagaaggaaagtttcagcggagtcggttttagaaaagcatatataaaaggggggattattggtaatgatttaaataattcttcagaacatatatactatttaaatgcgactgagattagcaatttaataaatggtgatgttgcatattgttttaaaaaagaaagtttggtaaaaaatccattcccccgtatagaagatgaaaaatttgttccagaattatatatttggaataaaataactgacaaggcgaagattcgatttaacataagcaaagttatatatctttgtgagtatcttgatgatggtctttctaaaaatttccataaccagcttaaaaaatacccaaaggggtttaagatttattacaaagatcaaagaaaacgagagaaaacttatataaaaaaaacaaagatgctaattagatatttgcaatgttgttattatgagaaaataaaa

SEQ ID NO: 1324 - protein, 262 aa, Escherichia coli
MISILTPTFNRQHTLSRLFNSLILQTDKDFEWIIIDDGSIDATAVLVEDFRKKCDFDLIYCYQENNGKPMALNAGVKACRGDYIFIVDSDDALTPDAIKLIKESIHDCLSEKESFSGVGFRKAYIKGGIIGNDLNNSSEHIYYLNATEISNLINGDVAYCFKKESLVKNPFPRIEDEKFVPELYIWNKITDKAKIRFNISKVIYLCEYLDDGLSKNFHNQLKKYPKGFKIYYKDQRKREKTYIKKTKMLIRYLQCCYYEKIK

SEQ ID NO: 1325 - DNA, 933 bp, Escherichia coli
atgcaaaccagtacagtaaccattctaatggccacctacaatggcgaggccttcatcaaaaatcagattttgtcactacaacaacaaacattttctaactggcggttatttattcaggatgatgggtctacagacaatactatatctataataaaaaacttccaaaaatctgactccagaattcggctagttgatgataatttgaaaggtcaaggtgcaggaaaaaattttttatcgctgataaagtacagcgagacagattatacaatttattgtgaccaagatgatatttggttagaaaacaaaatatttgaattagtaaagtatgcaaatgaaattaaattgaatgtatcagatgcgccttcgctagtttatgctgatggctatgcttatatggatggtgagggtacaatcgatttttctgggatatctaacaatcatgctgatcaattaaaggattttcttttttttaatggtggataccaaggatgttctattatgttcaatcgtgcaatgaccaaatttcttctgaattatcgaggatttgtatatctacatgacgatatcacaacattagctgcatacgctcttggtaaagtttattttctcccgaaataccttatgttatatagacagcacacgaatgcggtaactggtatcaaaacattccgcaatggattgacttctaaatttaaatcaccagtaaactatcttttatcacgaaaacattatcaggtaaaaaaatctttttttgaatgtaacagctctatcttatcagagacgaataaaaaagtttttttggattttatttcattttgtgaatcaaataataaatttacagatttttttaagttatggcgaggtgggtttagattaaataacagtagaactaaattattattaaaattcttaatacggagaaaatttagcgaa

SEQ ID NO: 1326 - protein, 311 aa, Escherichia coli
MQTSTVTILMATYNGEAFIKNQILSLQQQTFSNWRLFIQDDGSTDNTISIIKNFQKSDSRIRLVDDNLKGQGAGKNFLSLIKYSETDYTIYCDQDDIWLENKIFELVKYANEIKLNVSDAPSLVYADGYAYMDGEGTIDFSGISNNHADQLKDFLFFNGGYQGCSIMFNRAMTKFLLNYRGFVYLHDDITTLAAYALGKVYFLPKYLMLYRQHTNAVTGIKTFRNGLTSKFKSPVNYLLSRKHYQVKKSFFECNSSILSETNKKVFLDFISFCESNNKFTDFFKLWRGGFRLNNSRTKLLLKFLIRRKFSE

SEQ ID NO: 1327 - DNA, 1188 bp, Escherichia coli
atgatatatatattaactttaactcttcttctagttatagccataatgttttctcttctcggcacaaaaagtaggatcacatctccattacctttgcattttttaccatggttactaactttaattgtcgggataagtaattacgatcaattttacgagtttaatgaaagaagcttttactctttgttgatttggtttacagttatttttatattttatttcataggggaactggttaattataaacgtgaaaatataaatgtttattatggtctttcacatattaaatatgaatgtaaaaaatattggatcattgtcatcccaatttcattatataccattttcgaaatatatatggttggtatggggggagcagatggattctttctcaatttacgtcttgcaaatacattggagggctatacgggtaaaaaatttatcttaatgcctgctgtatatcctctaatgatggctatgttcgcaattgtttgtctaacaaaaacttccaaattaaataaatactccatttatttctggatgtttttgtattgtattggcacaatgggaaaattttcaatattaacgccaatattgacatatttaattatttatgacttcaaacatagattaaaagtaaaaaaaacaataaagtttacattgttgataattatattagctttaactttgcattttacacgtatggctgagaatgaccactcaacatttttatctattttagggctctatatttattcaccaataattgctttaggccagttgaatgaagtaaatagtagtcattttggtgagtatacgtttagattcatatatgctataactaataaaattggccttattaaagaattgccagtaaatactattcttgactattcatacgttcctgtaccaacaaatgtatatactgcacttcaaccattttaccaggattttggttatactggcatcatatttggagcagtattatacggactaatatatgtgagtttatacacggccggtgttcgtggaaataatacacaggcattactgatttacgcattgttttcagttagcagtgcaacggctttcttcgctgaaacgctagtaacgaatttagctggaaatgtgaagttagtattatgtaccatcttactatggcgatttacagtaatatgcaaaccagtacag

SEQ ID NO: 1328 - protein, 396 aa, Escherichia coli
MIYILTLTLLLVIAIMFSLLGTKSRITSPLPLHFLPWLLTLIVGISNYDQFYEFNERSFYSLLIWFTVIFIFYFIGELVNYKRENINVYYGLSHIKYECKKYWIIVIPISLYTIFEIYMVGMGGADGFFLNLRLANTLEGYTGKKFILMPAVYPLMMAMFAIVCLTKTSKLNKYSIYFWMFLYCIGTMGKFSILTPILTYLIIYDFKHRLKVKKTIKFTLLIIILALTLHFTRMAENDHSTFLSILGLYIYSPIIALGQLNEVNSSHFGEYTFRFIYAITNKIGLIKELPVNTILDYSYVPVPTNVYTALQPFYQDFGYTGIIFGAVLYGLIYVSLYTAGVRGNNTQALLIYALFSVSSATAFFAETLVTNLAGNVKLVLCTILLWRFTVICKPVQ

SEQ ID NO: 1329 - DNA, 1245 bp, Escherichia coli
atgagtttaatcaaaaacagtttttggaacctttgcgggtatgtacttacagctattgtgacactaccagctttgggtattatggggcgaaaattaggcccagaattatttggtgtattcactttggcattagctgttgtgggttatgcaagcatttttgatgcaggccttactcgcgcagtgatacgagaagtcgcaattgaaaaagataatgaagaaaataagttgaaaattatttcttcagcgacagttgtaattatttatttgagtttggccgcctcactcttattatttttttttagtggtcatatcgcattgctactgaacattagtgagactttttttcataatgtaagtgtctcgcttaaaattctcgcagcatccataccattatttttgattactcaaatatggttgtcaattttagaaggtgaagaaagatttggtttacttaatatctacaaatcaattacgggagtgatattagcaatctcaccggcattatttatacttattaaaccctctttgatgtatgcgataataggcttagttctagcaaggtttttatgttttattttggcttttataatttgtcacgataaagtgcttaaagctaaactaacaatcgatataccaacaattaaaagattgtttatgttcggtggttggattacagtaagtaatatcatcagccctgtgctatcatattttgataggtttattgtttcaaatcaacttggggctgctaatgttgctttttatactgcaccatcagaaattatttctcggcttagtataattccaggtgcgttttcaagagccttatttccaagattagctaatgcaaataattccgctgaaagatataaaacgaaaagattaattacaatttcacttttaataatcatcacccctattttttgtattggcgtgttattttcagagaagataatggttttatggatgggggcatcattttttggtgagcctggtttggtattatcaatattactgattggctttatttttaatggattggcacaagtaccatttgccagtattcaatcccgaggtcatgctaagataactgcatttgttcatctcttagagttgtttccttatttattacttttattttacctcataaaagcacatggggttgttggcgcgggtattgcgtggtcagtgaggatgatagtagattatatagcattaagtcttttggacggtaagtatattaataaa

SEQ ID NO: 1330 - protein, 415 aa, Escherichia coli
MSLIKNSFWNLCGYVLTAIVTLPALGIMGRKLGPELFGVFTLALAVVGYASIFDAGLTRAVIREVAIEKDNEENKLKIISSATVVIIYLSLAASLLLFFFSGHIALLLNISETFFHNVSVSLKILAASIPLFLITQIWLSILEGEERFGLLNIYKSITGVILAISPALFILIKPSLMYAIIGLVLARFLCFILAFIICHDKVLKAKLTIDIPTIKRLFMFGGWITVSNIISPVLSYFDRFIVSNQLGAANVAFYTAPSEIISRLSIIPGAFSRALFPRLANANNSAERYKTKRLITISLLIIITPIFCIGVLFSEKIMVLWMGASFFGEPGLVLSILLIGFIFNGLAQVPFASIQSRGHAKITAFVHLLELFPYLLLLFYLIKAHGVVGAGIAWSVRMIVDYIALSLLDGKYINK

SEQ ID NO: 1331 - DNA, 10848 bp, Escherichia coli
ctttcatttatggtttccatcatgagctgttgctgcttttctttggacagtcgagcgataccaaagcctgtgaacccccacagcgtcgcaaagaaaatgccactccagcagagaatagcccacggaagatagcttaatgtagcaacgccaagtgtacctgccatgtaggcacccgcggcagtccagggcagaattggatcaaatatggtggcagagtcttctacagtccttgccagattatttggatgtaggccgggctcaatataagcacttagtagcatttcaatcggaatcaggattgatatctgaccattacaggtcacgctaatcattgttaaaccacaggcaatagtcgcaagaatcatggttcctgtggaatgaactaatttgagcagattatggacgatgacttctaaagcgccgctcaaggctaatgttcccgcaaatgaaagggcgcagaaacaaataagcaacgtactcatcatcgagttcatgccaccgcggtttaacaaattacctaatagcggattaacatctttatcggtaagcattgaaacgttaaatccgtctactgcacttttaacaatgtcgtgtagtgcgaacccctgaataacgctggcgttgatcatggctaccagtgccgaaacaagcataattggaatggttggtttcttggtaatcgaaccgtacaggacaatggcaatgggtagcaataacaataaattaaaatgataaattccttttaatccttcagtgattagctgaattttttcgggaatggttgagccgccgagctcgctattcatcccatagagcgtcataacaaaggctgacagtatcaatgaaggaagggttgtataaagtaaatgagcgatgtgttcatagagatctatctgggctgccattgcggctaagttagtatcgccagaaaggggagacagtttgtccccgaagtaagcccctgccacaatagcgcctgcagttgctgccagattagcctccattccgatagccacacccataaacgcaacaccgacggtgcctgcggatccccaggatgtccctgtgcatacagaaacgatggcagtaacgagcagggccgtcacatagatcatggaaggatttatcagattaaggccgtaataaatcatcagcggaatagtaccgcctatcatccatgtcccaatcaggaggcccacgctgatcaaaattagcagagcaggcattgttttagcgattttctgcgatattgattcaaggattgcattgtagccataccccaaccgcttaactaacagtgcagcaatgacggttgaaagaaccattaatggctcaggtggcagatcgaatgccgcataaccaaatcccagcaatagtatcatcgctagtattggtaataatgattccaccagagttggggatcttggagtattgttattattcatgaagggaaactcctgtagtgaaggggatgctctgataaatccgttcaaatgcttgtgtaagattgcttctcggcgtggctatgttcacacggaaaaaaccaagtccttcatcgcctagatcctgatccccagctcatctcaacacctgcgagcgagacaaaccaatggcgtagttgctcttcgctgatgttcattgcccggtagtcgatccacaacatgtaagttccgccaccagaggcgacaaaccagtctggaaaatgagcttggcagaatgattgaacccagctcctgttttcgaccaaataatcttttaatgctgctaaccaagaatcgccatggcggtaagcacagagaaatgcaggaacagagaaataaccaggattatggatacctgctgcaataagagctaatttaaactgttcacgatatttatcgttagcaataacaatatttgcgatttcaagtccggccatattaaaagtttttgctggagatgtacaaataaacgagttttgtgcaacgtatgagcttatagaagaaattgtttgatgttgtttttgggtgaagttgaagtctgcatgaacatcatcagaaataataaaaatattatatttttctgctaatgaagctattttccttagattgtcttctgaccagattgttcctgttggattatgcggcgatattagaatgaaacaacaagccattttaaacttatcttcgagatccgcaaagtctatttcatagtggtggtcacgataaagtaacgcactttccagcaatactcgatggttgacttcaactgcatgactaataggatgataggctggtgtcaggctgacaatagcatctcccggttgggtaaagttctggataaataatgagacggcctgtactacccgtgggcaaaaaacaatgtgttcagggttgaccttccacgagtaatggcgttgataccactgtgctgccacttgctgccagtcatcacttaataatgtataaccgtagatacctttctgatttgcgacagataattcagaaactataaaatcagctacaggaatatccatatcagctacagacagaggaatgatgtcatgccccttgttattatatttagcgctataggttccgtcgcgtgaaataactttatcaaaattataaactttcatatttgttactcgcccgattttatcgttagggtaacgtaatatatcgagggaggaagtgttattctgtattttgttttcgttattatgaaaatttgcatatgtgatgtttatcacaaagatgttaactatctgtcaataaaaagactccagcaaatgtaaacgttttacatcgcttaagcctatggaatttacataaaaaaaagggcgtgccgagtctttcgacccaatcattatctcggtaactccattcacaagagcaggaaataaccccttcaacaaataacagactgatgcctgcgagcgcgctccccaggtttccgggctgaaagtaccgccgcactcgtttaacgcggaacagtctgtgttggcggtttaatggtggatgttgctgtagaccacaactgatgaggcaacggagttgaaccgccccggaaatcctggagactaaacttcctgagaaagaggtaaacaggatgactaaaaaaacacgtttttcccccgaagtccgtcaacgggcagttcgtatggttctggaaagtcagggcgaatatgactcacaatgggcggcaatttgttccattgctccaaagactggctgtacgccggagactctgcgtgtctgggttcgccagtatgagcgggataccggaggcggtgatggtgggcttaccaccgctgaacgtcagcgtctgaaagagctggaacgtgaaaatcgtgaactgcgccgcagtaacaatatccttcgccaggcttccgcttattttgcgaaggcggagttcgaccgcctctggaaaaagtgatggcactgctggataagctgcgtgagcagtacggggtcagaccggtatgcagtgaactgcatattgccccgtcaacgtattaccactgtcagcaacagcgacatcatcctgataaacgcagtgcacatgcacagcgcgatgactggctgaagagagagatacagcgcgtatacgatgaaaatcatcaggtgtacggtgtgcgtaaagtctggcgtcagttgttacgggaaggaatcagggtggccagatgtacagtggcgcgcctcatggcggttatgggactttccggtgttctccggggtaaaaaggtccgcactaccgtcagccggaaaaccgttgccgcaggtgaccgcgtaaaccgtcagtgcgtggcagaacgtcctgaccagctgtgggtggctgattttacttacgtcagcacatggcagggcttcgtctatgtggcgttcatcattgatgtgtttgccggatacatcgtggggtggcgggtatcatcgtccatggaaacgacattcgtgctggatgcgctggagcaggcgttgtgggcccgtcgtccgtccggcaccatccatcacagcgataaaggctctcagtatgtgtcactggcctatacggagcgattaaaagaagcaaaactgctggcatcaacagggagtacaggcgactcgtatggcagcgcgatggcggagagcatcaatggtctttacaaagcggaggtaatacaccgtaagagctggaaaaaccgtgcagaagtggaactggccacactcacgtgggtggactggtataacaatcgacgattgctgggaaggctgaggcatactcctccggcagaagcagaaaaagcgtattatgcttctatcggaaatgatgagctggcagcctgagttcacagataaaacactctctaggaaccccggggcggttcattctcgcttgccttctgtatttcaaaaagcatcattcaggtcattaaaagttatttgatcatctttttatggattttctgttcatcgaaagggtaacagattcccaccattgtgcagaccaggagaattaacagcagcagtaggatttatacgacaaattgtgacctcacacgcaatacccatactcacttcatgggtagctgcttctccttgatagcgatcaaaaaaaaacataccgtctggtcggtatgcttctgcctatgaatacagaaacccaacatcataaaaaagatcccatccgtctgtatcagcagttgctggagtctgcagctatgattgctggtcgtgacggtatcgctgccctctcgctgaatgcggttgcccgcgaagctggcgtgagtaaaggtggattactgcatcactttccgaacaagcaggcgctgatctacgccttgtttgcccggttgttggcaataatggaagaggccatcgctgccctgatgcaaaaagacaatataagctatggccgttttactcgcgcatatgtgaactatctttctgcgctgactgacacacaagaaagccgtcaattgatggtgctttcgctggcaatgcccgatgaaccggtgctgcgaaaatgctggcgagactggatgcttggtcatttagcgaatggcgatgaactggataatagcccaaccggaacgctggtgcgctataccgcagatggcatctggttgtctgagttaacggaagggatcaccatgagccccgaacatcgtcaggcactggttgattcactgaataagatgacacttcccgcgtgaagtcccatggattgaggtcgcgatgcgctataacatcaatgcccgtttcatttatgacgctacggatggcacgcttacgctaccgcaaagcactgagccagactgccaactctcgataacgtcctgcgcgctgctcaacttttttttgcatcataccgatatcgttagtcgcgaagaggtactgacaaaagtttgggataacaacggattaacttcttctaacagcaatctgaatcagtatctcagtatgctgcgcaagacgttccgtcactatggtattgataatattatcattaccgttgcacgcggctatctgcagctaaacccgaatgtatccatcgaaccactggatgaagcccctgcgccacctgcaattatagagccatccataatccctgatgttgacgtaccaacatccagtgaggataccgagtcttcaccaccaacattagcgccagtcacccatcgtcacgacgcttactggtattttgcaggtgcctgtttgttaaccatttcgattctgttggtagccttcaatttgttcggtatcagcgaggcgcgccccatcgctttgacgcaactttctcatagccagtgcgaattactggcaagcgacgaaatgcgccgttcagtaagcgtgaaggcatatgagaaaaattatgacgaagtccgtaagcgtctaaatatcgcctgtaaaccaagtgagcgttttctttttttctacggtgacaggctggaaaccaacggccttgggcgagtgttcctcgcgcactgcgctatgcatgaaaataacccgtttagttattgcgataactacttttattactcttggaaactgtaatgagaatcgcaccgcgtaccttctttgctatttccgccctggcgtttattgtcgcctccggatttagtttctggcggttgtcccctgctgaaaatacagggattatgagttgttcaacaaaaggcatcatgcgttttgagaatatggaaaaggagaacgttaacggtaatattcactttaactttggcagccagggtaaaggttcgatggtgctcgaaggctacacggactctgccgctggctggctgtacctgcaacgctatgtcaaatttacctataccagtaaacgtgtttccgccacggaacgccattaccgcatcagccagtgggaatccagcgcctcatcgatagatgaatcaccagatgtgatttttgactactttatgcgtgaaatgtctgacagccatgacgggctgttcctcaacgcccagaagctgaacgataaagcgattttgctcagttctattaattcaccgctttggatctgtacccttaaatctggcagcaaattagactagttttttctggctgccttacgcaacgaattgctcaccactttcatcgtccccccttcgcctgacgagaaacacgactctttaacttcgtgatagcacaggcgatttgtgatgtaccacgcattccattttccccttctcaacggccctgagcaaaagcgcattttttgcgtttagggtttgcgccaaagtatgagccccaacacacttcaccgctgtagctgttacccccttttcgtaattatttagcaacttagcaacaaacatacccggcgaaaaaaatacgccaaaaagcgcattattaaaaacaaaatcctccccaccactccagcacaaatacataaatcagagtgtattgaaagctaaatttcagaatttaattctgaatcattgctgtcagcagatttaaattccacaaaattccatgagctctatagtgacattcgaacgccgcttccgtgagttaacgctgtgtcacggacggttttcctgaatcacaaaacctgttctgaggagatcaccatgggtgatgcattagggcttatcgaaaccaaaggcctggtggcctgtattgccgcagcggatgcgatgtgtaaatccgccaacgttgaactgattggctatgaaaacatcggctctggtctggtgaccgtgatggtgaaaggcgacgttggcgcagtgaaagcatctgtcgattctggacttgagtccgcacagcacatcggggaagtggtgacgtcgctggttatcgcgcgtcctcacaacgacatcaacaaaatcgttattaaacataaagcttaaggccggagggaagaaacatgggtgatgcattaggtctgattgaaaccaaaggtttggtggcttgtattgaagcagctgacgcgatgtgtaaggccgccaacgttgagttgattggctatgaaaacgtcggttctggtctggttaccgcaatggtgaaaggtgatgtcggcgcagtaaaagcggcggtggattccggtgttgagtccgcacagcgcattggcgaggtggtgacgtcgttggttatcgcgcgtccacacaatgacatcaacaagattgtctcgcactacaaaattaccgattaaccggagaaaacataatgagagaagcgcttggtctgatcgaaaccaaaggtctggtggcctgtattgaggcggcagacgcgatgtgtaaagccgccaacgttgagttgattggctatgaaaacgtcggctctggcctagtcaccgcgatggtaaaaggcgacgttggcgcagtgaatgccgcggtggattccggtgttgaagcagcaagacgtatcggtgaagtggtgacctcccgtgtcatcgcccgcccgcataacgacatcgaaaaaatcgcgtcgcagcataaagcatgacctgacagggcacgccccgtctgcactcttttagtctgatgaaggatagactcatgattgaactggataccgatttgcgctcccgtcagaacgcgcgggtgctggtgcgtaacgccaaaaaagcgcaagcgattatggccactttttcgcagcagcaaatcgacgccatcgtgaaaaacgtggcccaggaagcagcacaccacgctgaagcactggcaaaaatggccgcagaagaaactggcttcggcaactggcaggataaagtcctgaaaaaccgtttcgcctcgctgcgtgtttacgatgccatcaaagatatgaagaccgtcggcatcattcatgacgatcaacagcaaaaagtgatggacgtgggcgtgccgctgggtgtgatttgcgccctggtgccgtcaaccaacccgacttccaccatcttctacaaaacgctgatcgccctgaaagccggtaatgcgattattttctctccgcatcccggcgcacgtcagtgtagctggaaggcgatagaagtcgttaagcgtgccgcagaagctgctggtgcacctgcgggtattgtcgatggtgtaaccgagctcacgctggaagcaacccaggaactgatgcatagcaaagatgtttcgctgattctggctaccggtggtgaaggaatggtacgagcagcatatgcttctggcacaccgaccatcagcggtggtcctggtaacggtccggcatttattgaacgcagtgcggatatccaccatgcggtgaaagatatcatcaccagcaaaaccttcgataatggtgtgatctgcgcttctgaacagtcgattattgttgaacgctgcatttacaacgaagtacaccgcgaactggaagctcagggtgcttactttatgaacgaagatgaagcggcaaaaatggcagctctgctgctgcgcccgaacggcacgattaacccgaaagtggtgggaaaaaccgcactgtatttaagccagatggccggtttttgtgtgcccgccagtaccagagtactgattgccgaacaaactaccgtttctcacaaaaacccctactcacgtgaaaagctgtgcccggttcttggtctgtatatcgaagaggactggaaagctgcctgccaccgcgtggtggagttgctgactaacgaaggtctgggccacacactggtgatccatacccgcaaccaggatgtgatccgtcaattctgccttgaaaaaccggttaaccgcattctgatcaatacccctgcggcgcttggcggtattggcgctaccactaacattacccccgccctgacgcttggatgcggtgcggtaggtggtggttcctcttccgataacgtcgggccaatgaatctgctcaacattcgtaaagtgggctatggcgtgcgttccatcgatgagttgcgttctccgggtagccgtgcagaaccgcagccagccatcgccgcgccgatagtggatccgcatcgcagcattcttgacgatgcccgcttcacctcccctgccccggcaaccacatctgctgatgatcgttttactgtggcaacgactgatcccgaaggcgagatcaacgagcagaacgttgagcgagtcatccgccaggtgcttgagcgcttaggcaagtaattcattgagataaggcgataaaaacgatgattctcgcaaaggtaaccggacatgtcgtcgccacgcaaaagtgcgatgagctgcgcggcagcaacctgttgttgatcacccaactggatgataaccaacagctgatgaaggaccgctcctgggtcgctgtcgatagcgtcggtgcaggcgttcatgacgttgtgctggcggaggagtacttcgcactcaataaagatcgttacaaagcgatgtcagtggtcgccattgtcgagaaggtttttcgggacgcttaaggagtgaaaaaaccaatgagtgagtttttgctgaaaccccggatctgcttcggtcaagacgcgctgtcagtcctggacgagctaaccgcctgtcatgttttgctggttaccgatcaggcgatggtcaaattcggtcttgctgaacgtgtcacgcagcgtctctgtgcgcgcggcattgactggcaggtgtgggatgacgttgtcgccgatccggatatcgctaccgtggtccgagggatgaagttgatggacagctgctacccggatctggttatcgcactcggcggtggttcggtcattgacgcagccaaagcggttattttcgccctggcgcaaacccgtccggaagcaggacgtgaacgcccctgctttgtggctattccaaccaccagcggtacgggctcagaagtgaccagtttctcggtggtgaaagcccatgccgaaaaactggtgctggttgactcgtcgctgctaccggatatcgccattcttgatccgtcactggtggcatccgtgccacctgctatcaccgctgacaccggaatggatgtgttgtgccacgctctggaggcttatgtctcccttgccgccagcgacttttccgatgcacttgctgaaaaagtggtgcaacaggtgttcagctacctgccgggctgctggcgtaacggccaggatttgcaggctcgggagaaaatgcacaacgcctcatgtatggcaggaatggcgtttaccaatgcctctcttggcatcacccatagcctggctcatgcccttggtggtgttttccgtgtccctcatgggcgcgcaaatgccctgctaatggcacacgttgtggcatggaatgctgactaccacggtcaatgcgacacccttgctgcgcggaaatatgcacgtctggcacatctgttggatctgcctgccagcacgcctcgtgaaggagtaacaagcctgctggtcgcaatccaaacgctgaaagatgaaatgaatatgcccaggggg

SEQ ID NO: 1332 - DNA, 1443 bp, Escherichia coli
atgaataataacaatactccaagatccccaactctggtggaatcattattaccaatactagcgatgatactattgctgggatttggttatgcggcattcgatctgccacctgagccattaatggttctttcaaccgtcattgctgcactgttagttaagcggttggggtatggctacaatgcaatccttgaatcaatatcgcagaaaatcgctaaaacaatgcctgctctgctaattttgatcagcgtgggcctcctgattgggacatggatgataggcggtactattccgctgatgatttattacggccttaatctgataaatccttccatgatctatgtgacggccctgctcgttactgccatcgtttctgtatgcacagggacatcctggggatccgcaggcaccgtcggtgttgcgtttatgggtgtggctatcggaatggaggctaatctggcagcaactgcaggcgctattgtggcaggggcttacttcggggacaaactgtctcccctttctggcgatactaacttagccgcaatggcagcccagatagatctctatgaacacatcgctcatttactttatacaacccttccttcattgatactgtcagcctttgttatgacgctctatgggatgaatagcgagctcggcggctcaaccattcccgaaaaaattcagctaatcactgaaggattaaaaggaatttatcattttaatttattgttattgctacccattgccattgtcctgtacggttcgattaccaagaaaccaaccattccaattatgcttgtttcggcactggtagccatgatcaacgccagcgttattcaggggttcgcactacacgacattgttaaaagtgcagtagacggatttaacgtttcaatgcttaccgataaagatgttaatccgctattaggtaatttgttaaaccgcggtggcatgaactcgatgatgagtacgttgcttatttgtttctgcgccctttcatttgcgggaacattagccttgagcggcgctttagaagtcatcgtccataatctgctcaaattagttcattccacaggaaccatgattcttgcgactattgcctgtggtttaacaatgattagcgtgacctgtaatggtcagatatcaatcctgattccgattgaaatgctactaagtgcttatattgagcccggcctacatccaaataatctggcaaggactgtagaagactctgccaccatatttgatccaattctgccctggactgccgcgggtgcctacatggcaggtacacttggcgttgctacattaagctatcttccgtgggctattctctgctggagtggcattttctttgcgacgctgtgggggttcacaggctttggtatcgctcgactgtccaaagaaaagcagcaacagctcatgatggaaaccataaatgaa

SEQ ID NO: 1333 - protein, 481 aa, Escherichia coli
MNNNNTPRSPTLVESLLPILAMILLLGFGYAAFDLPPEPLMVLSTVIAALLVKRLGYGYNAILESISQKIAKTMPALLILISVGLLIGTWMIGGTIPLMIYYGLNLINPSMIYVTALLVTAIVSVCTGTSWGSAGTVGVAFMGVAIGMEANLAATAGAIVAGAYFGDKLSPLSGDTNLAAMAAQIDLYEHIAHLLYTTLPSLILSAFVMTLYGMNSELGGSTIPEKIQLITEGLKGIYHFNLLLLLPIAIVLYGSITKKPTIPIMLVSALVAMINASVIQGFALHDIVKSAVDGFNVSMLTDKDVNPLLGNLLNRGGMNSMMSTLLICFCALSFAGTLALSGALEVIVHNLLKLVHSTGTMILATIACGLTMISVTCNGQISILIPIEMLLSAYIEPGLHPNNLARTVEDSATIFDPILPWTAAGAYMAGTLGVATLSYLPWAILCWSGIFFATLWGFTGFGIARLSKEKQQQLMMETINE

SEQ ID NO: 1334 - DNA, 1062 bp, Escherichia coli
atgaaagtttataattttgataaagttatttcacgcgacggaacctatagcgctaaatataataacaaggggcatgacatcattcctctgtctgtagctgatatggatattcctgtagctgattttatagtttctgaattatctgtcgcaaatcagaaaggtatctacggttatacattattaagtgatgactggcagcaagtggcagcacagtggtatcaacgccattactcgtggaaggtcaaccctgaacacattgttttttgcccacgggtagtacaggccgtctcattatttatccagaactttacccaaccgggagatgctattgtcagcctgacaccagcctatcatcctattagtcatgcagttgaagtcaaccatcgagtattgctggaaagtgcgttactttatcgtgaccaccactatgaaatagactttgcggatctcgaagataagtttaaaatggcttgttgtttcattctaatatcgccgcataatccaacaggaacaatctggtcagaagacaatctaaggaaaatagcttcattagcagaaaaatataatatttttattatttctgatgatgttcatgcagacttcaacttcacccaaaaacaacatcaaacaatttcttctataagctcatacgttgcacaaaactcgtttatttgtacatctccagcaaaaacttttaatatggccggacttgaaatcgcaaatattgttattgctaacgataaatatcgtgaacagtttaaattagctcttattgcagcaggtatccataatcctggttatttctctgttcctgcatttctctgtgcttaccgccatggcgattcttggttagcagcattaaaagattatttggtcgaaaacaggagctgggttcaatcattctgccaagctcattttccagactggtttgtcgcctctggtggcggaacttacatgttgtggatcgactaccgggcaatgaacatcagcgaagagcaactacgccattggtttgtctcgctcgcaggtgttgagatgagctggggatcaggatctaggcga

SEQ ID NO: 1335 - protein, 354 aa, Escherichia coli
MKVYNFDKVISRDGTYSAKYNNKGHDIIPLSVADMDIPVADFIVSELSVANQKGIYGYTLLSDDWQQVAAQWYQRHYSWKVNPEHIVFCPRVVQAVSLFIQNFTQPGDAIVSLTPAYHPISHAVEVNHRVLLESALLYRDHHYEIDFADLEDKFKMACCFILISPHNPTGTIWSEDNLRKIASLAEKYNIFIISDDVHADFNFTQKQHQTISSISSYVAQNSFICTSPAKTFNMAGLEIANIVIANDKYREQFKLALIAAGIHNPGYFSVPAFLCAYRHGDSWLAALKDYLVENRSWVQSFCQAHFPDWFVASGGGTYMLWIDYRAMNISEEQLRHWFVSLAGVEMSWGSGSRR

SEQ ID NO: 1336 - DNA, 324 bp, Escherichia coli
atgactaaaaaaacacgtttttcccccgaagtccgtcaacgggcagttcgtatggttctggaaagtcagggcgaatatgactcacaatgggcggcaatttgttccattgctccaaagactggctgtacgccggagactctgcgtgtctgggttcgccagtatgagcgggataccggaggcggtgatggtgggcttaccaccgctgaacgtcagcgtctgaaagagctggaacgtgaaaatcgtgaactgcgccgcagtaacaatatccttcgccaggcttccgcttattttgcgaaggcggagttcgaccgcctctggaaaaag

SEQ ID NO: 1337 - protein, 108 aa, Escherichia coli
MTKKTRFSPEVRQRAVRMVLESQGEYDSQWAAICSIAPKTGCTPETLRVWVRQYERDTGGGDGGLTTAERQRLKELERENRELRRSNNILRQASAYFAKAEFDRLWKK

SEQ ID NO: 1338 - DNA, 885 bp, Escherichia coli
atggcactgctggataagctgcgtgagcagtacggggtcagaccggtatgcagtgaactgcatattgccccgtcaacgtattaccactgtcagcaacagcgacatcatcctgataaacgcagtgcacatgcacagcgcgatgactggctgaagagagagatacagcgcgtatacgatgaaaatcatcaggtgtacggtgtgcgtaaagtctggcgtcagttgttacgggaaggaatcagggtggccagatgtacagtggcgcgcctcatggcggttatgggactttccggtgttctccggggtaaaaaggtccgcactaccgtcagccggaaaaccgttgccgcaggtgaccgcgtaaaccgtcagtgcgtggcagaacgtcctgaccagctgtgggtggctgattttacttacgtcagcacatggcagggcttcgtctatgtggcgttcatcattgatgtgtttgccggatacatcgtggggtggcgggtatcatcgtccatggaaacgacattcgtgctggatgcgctggagcaggcgttgtgggcccgtcgtccgtccggcaccatccatcacagcgataaaggctctcagtatgtgtcactggcctatacggagcgattaaaagaagcaaaactgctggcatcaacagggagtacaggcgactcgtatggcagcgcgatggcggagagcatcaatggtctttacaaagcggaggtaatacaccgtaagagctggaaaaaccgtgcagaagtggaactggccacactcacgtgggtggactggtataacaatcgacgattgctgggaaggctgaggcatactcctccggcagaagcagaaaaagcgtattatgcttctatcggaaatgatgagctggcagcc

SEQ ID NO: 1339 - protein, 295 aa, Escherichia coli
MALLDKLREQYGVRPVCSELHIAPSTYYHCQQQRHHPDKRSAHAQRDDWLKREIQRVYDENHQVYGVRKVWRQLLREGIRVARCTVARLMAVMGLSGVLRGKKVRTTVSRKTVAAGDRVNRQCVAERPDQLWVADFTYVSTWQGFVYVAFIIDVFAGYIVGWRVSSSMETTFVLDALEQALWARRPSGTIHHSDKGSQYVSLAYTERLKEAKLLASTGSTGDSYGSAMAESINGLYKAEVIHRKSWKNRAEVELATLTWVDWYNNRRLLGRLRHTPPAEAEKAYYASIGNDELAA

SEQ ID NO: 1340 - DNA, 576 bp, Escherichia coli
atgcttctgcctatgaatacagaaacccaacatcataaaaaagatcccatccgtctgtatcagcagttgctggagtctgcagctatgattgctggtcgtgacggtatcgctgccctctcgctgaatgcggttgcccgcgaagctggcgtgagtaaaggtggattactgcatcactttccgaacaagcaggcgctgatctacgccttgtttgcccggttgttggcaataatggaagaggccatcgctgccctgatgcaaaaagacaatataagctatggccgttttactcgcgcatatgtgaactatctttctgcgctgactgacacacaagaaagccgtcaattgatggtgctttcgctggcaatgcccgatgaaccggtgctgcgaaaatgctggcgagactggatgcttggtcatttagcgaatggcgatgaactggataatagcccaaccggaacgctggtgcgctataccgcagatggcatctggttgtctgagttaacggaagggatcaccatgagccccgaacatcgtcaggcactggttgattcactgaataagatgacacttcccgcg

SEQ ID NO: 1341 - protein, 192 aa, Escherichia coli
MLLPMNTETQHHKKDPIRLYQQLLESAAMIAGRDGIAALSLNAVAREAGVSKGGLLHHFPNKQALIYALFARLLAIMEEAIAALMQKDNISYGRFTRAYVNYLSALTDTQESRQLMVLSLAMPDEPVLRKCWRDWMLGHLANGDELDNSPTGTLVRYTADGIWLSELTEGITMSPEHRQALVDSLNKMTLPA

SEQ ID NO: 1342 - DNA, 816 bp, Escherichia coli
atgcgctataacatcaatgcccgtttcatttatgacgctacggatggcacgcttacgctaccgcaaagcactgagccagactgccaactctcgataacgtcctgcgcgctgctcaacttttttttgcatcataccgatatcgttagtcgcgaagaggtactgacaaaagtttgggataacaacggattaacttcttctaacagcaatctgaatcagtatctcagtatgctgcgcaagacgttccgtcactatggtattgataatattatcattaccgttgcacgcggctatctgcagctaaacccgaatgtatccatcgaaccactggatgaagcccctgcgccacctgcaattatagagccatccataatccctgatgttgacgtaccaacatccagtgaggataccgagtcttcaccaccaacattagcgccagtcacccatcgtcacgacgcttactggtattttgcaggtgcctgtttgttaaccatttcgattctgttggtagccttcaatttgttcggtatcagcgaggcgcgccccatcgctttgacgcaactttctcatagccagtgcgaattactggcaagcgacgaaatgcgccgttcagtaagcgtgaaggcatatgagaaaaattatgacgaagtccgtaagcgtctaaatatcgcctgtaaaccaagtgagcgttttctttttttctacggtgacaggctggaaaccaacggccttgggcgagtgttcctcgcgcactgcgctatgcatgaaaataacccgtttagttattgcgataactacttttattactcttggaaactg

SEQ ID NO: 1343 - protein, 272 aa, Escherichia coli
MRYNINARFIYDATDGTLTLPQSTEPDCQLSITSCALLNFFLHHTDIVSREEVLTKVWDNNGLTSSNSNLNQYLSMLRKTFRHYGIDNIIITVARGYLQLNPNVSIEPLDEAPAPPAIIEPSIIPDVDVPTSSEDTESSPPTLAPVTHRHDAYWYFAGACLLTISILLVAFNLFGISEARPIALTQLSHSQCELLASDEMRRSVSVKAYEKNYDEVRKRLNIACKPSERFLFFYGDRLETNGLGRVFLAHCAMHENNPFSYCDNYFYYSWKL

SEQ ID NO: 1344 - DNA, 516 bp, Escherichia coli
atgagaatcgcaccgcgtaccttctttgctatttccgccctggcgtttattgtcgcctccggatttagtttctggcggttgtcccctgctgaaaatacagggattatgagttgttcaacaaaaggcatcatgcgttttgagaatatggaaaaggagaacgttaacggtaatattcactttaactttggcagccagggtaaaggttcgatggtgctcgaaggctacacggactctgccgctggctggctgtacctgcaacgctatgtcaaatttacctataccagtaaacgtgtttccgccacggaacgccattaccgcatcagccagtgggaatccagcgcctcatcgatagatgaatcaccagatgtgatttttgactactttatgcgtgaaatgtctgacagccatgacgggctgttcctcaacgcccagaagctgaacgataaagcgattttgctcagttctattaattcaccgctttggatctgtacccttaaatctggcagcaaattagac

SEQ ID NO: 1345 - protein, 172 aa, Escherichia coli
MRIAPRTFFAISALAFIVASGFSFWRLSPAENTGIMSCSTKGIMRFENMEKENVNGNIHFNFGSQGKGSMVLEGYTDSAAGWLYLQRYVKFTYTSKRVSATERHYRISQWESSASSIDESPDVIFDYFMREMSDSHDGLFLNAQKLNDKAILLSSINSPLWICTLKSGSKLD

SEQ ID NO: 1346 - DNA, 276 bp, Escherichia coli
atgggtgatgcattagggcttatcgaaaccaaaggcctggtggcctgtattgccgcagcggatgcgatgtgtaaatccgccaacgttgaactgattggctatgaaaacatcggctctggtctggtgaccgtgatggtgaaaggcgacgttggcgcagtgaaagcatctgtcgattctggacttgagtccgcacagcacatcggggaagtggtgacgtcgctggttatcgcgcgtcctcacaacgacatcaacaaaatcgttattaaacataaagct

SEQ ID NO: 1347 - protein, 92 aa, Escherichia coli
MGDALGLIETKGLVACIAAADAMCKSANVELIGYENIGSGLVTVMVKGDVGAVKASVDSGLESAQHIGEVVTSLVIARPHNDINKIVIKHKA

SEQ ID NO: 1348 - DNA, 282 bp, Escherichia coli
atgggtgatgcattaggtctgattgaaaccaaaggtttggtggcttgtattgaagcagctgacgcgatgtgtaaggccgccaacgttgagttgattggctatgaaaacgtcggttctggtctggttaccgcaatggtgaaaggtgatgtcggcgcagtaaaagcggcggtggattccggtgttgagtccgcacagcgcattggcgaggtggtgacgtcgttggttatcgcgcgtccacacaatgacatcaacaagattgtctcgcactacaaaattaccgat

SEQ ID NO: 1349 - protein, 94 aa, Escherichia coli
MGDALGLIETKGLVACIEAADAMCKAANVELIGYENVGSGLVTAMVKGDVGAVKAAVDSGVESAQRIGEVVTSLVIARPHNDINKIVSHYKITD

SEQ ID NO: 1350 - DNA, 276 bp, Escherichia coli
atgagagaagcgcttggtctgatcgaaaccaaaggtctggtggcctgtattgaggcggcagacgcgatgtgtaaagccgccaacgttgagttgattggctatgaaaacgtcggctctggcctagtcaccgcgatggtaaaaggcgacgttggcgcagtgaatgccgcggtggattccggtgttgaagcagcaagacgtatcggtgaagtggtgacctcccgtgtcatcgcccgcccgcataacgacatcgaaaaaatcgcgtcgcagcataaagca

SEQ ID NO: 1351 - protein, 92 aa, Escherichia coli
MREALGLIETKGLVACIEAADAMCKAANVELIGYENVGSGLVTAMVKGDVGAVNAAVDSGVEAARRIGEVVTSRVIARPHNDIEKIASQHKA

SEQ ID NO: 1352 - DNA, 2868 bp, Escherichia coli
atgattgaactggataccgatttgcgctcccgtcagaacgcgcgggtgctggtgcgtaacgccaaaaaagcgcaagcgattatggccactttttcgcagcagcaaatcgacgccatcgtgaaaaacgtggcccaggaagcagcacaccacgctgaagcactggcaaaaatggccgcagaagaaactggcttcggcaactggcaggataaagtcctgaaaaaccgtttcgcctcgctgcgtgtttacgatgccatcaaagatatgaagaccgtcggcatcattcatgacgatcaacagcaaaaagtgatggacgtgggcgtgccgctgggtgtgatttgcgccctggtgccgtcaaccaacccgacttccaccatcttctacaaaacgctgatcgccctgaaagccggtaatgcgattattttctctccgcatcccggcgcacgtcagtgtagctggaaggcgatagaagtcgttaagcgtgccgcagaagctgctggtgcacctgcgggtattgtcgatggtgtaaccgagctcacgctggaagcaacccaggaactgatgcatagcaaagatgtttcgctgattctggctaccggtggtgaaggaatggtacgagcagcatatgcttctggcacaccgaccatcagcggtggtcctggtaacggtccggcatttattgaacgcagtgcggatatccaccatgcggtgaaagatatcatcaccagcaaaaccttcgataatggtgtgatctgcgcttctgaacagtcgattattgttgaacgctgcatttacaacgaagtacaccgcgaactggaagctcagggtgcttactttatgaacgaagatgaagcggcaaaaatggcagctctgctgctgcgcccgaacggcacgattaacccgaaagtggtgggaaaaaccgcactgtatttaagccagatggccggtttttgtgtgcccgccagtaccagagtactgattgccgaacaaactaccgtttctcacaaaaacccctactcacgtgaaaagctgtgcccggttcttggtctgtatatcgaagaggactggaaagctgcctgccaccgcgtggtggagttgctgactaacgaaggtctgggccacacactggtgatccatacccgcaaccaggatgtgatccgtcaattctgccttgaaaaaccggttaaccgcattctgatcaatacccctgcggcgcttggcggtattggcgctaccactaacattacccccgccctgacgcttggatgcggtgcggtaggtggtggttcctcttccgataacgtcgggccaatgaatctgctcaacattcgtaaagtgggctatggcgtgcgttccatcgatgagttgcgttctccgggtagccgtgcagaaccgcagccagccatcgccgcgccgatagtggatccgcatcgcagcattcttgacgatgcccgcttcacctcccctgccccggcaaccacatctgctgatgatcgttttactgtggcaacgactgatcccgaaggcgagatcaacgagcagaacgttgagcgagtcatccgccaggtgcttgagcgcttaggcagtaattcattggataaggcgataaaaacgatgattctcgcaaaggtaaccggacatgtcgtcgccacgcaaaagtgcgatgagctgcgcggcagcaacctgttgttgatcacccaactggatgataaccaacagctgatgaggaccgctcctgggtcgctgtcgatagcgtcggtgcaggcgttcatgacgttgtgctggcggaggagtacttcgcactcaataaagatcgttacaaagcgatgtcagtggtcgccattgtcgagaaggtttttcgggacgcttaaggaggtgaaaaaaccaatgagtgagtttttgctgaaaccccggatctgcttcggtcaagacgcgctgtcagtcctggacgagctaaccgcctgtcatgttttgctggttaccgatcaggcgatggtcaaattcggtcttgctgaacgtgtcacgcagcgtctctgtgcgcgcggcattgactggcaggtgtgggatgacgttgtcgccgatccggatatcgctaccgtggtccgagggatgaagttgatggacagctgctacccggatctggttatcgcactcggcggtggttcggtcattgacgcagccaaagcggttattttcgccctggcgcaaacccgtccggaagcaggacgtgaacgcccctgctttgtggctattccaaccaccagcggtacgggctcagaagtgaccagtttctcggtggtgaaagcccatgccgaaaaactggtgctggttgactcgtcgctgctaccggatatcgccattcttgatccgtcactggtggcatccgtgccacctgctatcaccgctgacaccggaatggatgtgttgtgccacgctctggaggcttatgtctcccttgccgccagcgacttttccgatgcacttgctgaaaaagtggtgcaacaggtgttcagctacctgccgggctgctggcgtaacggccaggatttgcaggctcgggagaaaatgcacaacgcctcatgtatggcaggaatggcgtttaccaatgcctctcttggcatcacccatagcctggctcatgcccttggtggtgttttccgtgtccctcatgggcgcgcaaatgccctgctaatggcacacgttgtggcatggaatgctgactaccacggtcaatgcgacacccttgctgcgcggaaatatgcacgtctggcacatctgttggatctgcctgccagcacgcctcgtgaaggagtaacaagcctgctggtcgcaatccaaacgctgaaagatgaaatgaatatgcccaggggg

SEQ ID NO: 1353 - protein, 956 aa, Escherichia coli
MIELDTDLRSRQNARVLVRNAKKAQAIMATFSQQQIDAIVKNVAQEAAHHAEALAKMAAEETGFGNWQDKVLKNRFASLRVYDAIKDMKTVGIIHDDQQQKVMDVGVPLGVICALVPSTNPTSTIFYKTLIALKAGNAIIFSPHPGARQCSWKAIEVVKRAAEAAGAPAGIVDGVTELTLEATQELMHSKDVSLILATGGEGMVRAAYASGTPTISGGPGNGPAFIERSADIHHAVKDIITSKTFDNGVICASEQSIIVERCIYNEVHRELEAQGAYFMNEDEAAKMAALLLRPNGTINPKVVGKTALYLSQMAGFCVPASTRVLIAEQTTVSHKNPYSREKLCPVLGLYIEEDWKAACHRVVELLTNEGLGHTLVIHTRNQDVIRQFCLEKPVNRILINTPAALGGIGATTNITPALTLGCGAVGGGSSSDNVGPMNLLNIRKVGYGVRSIDELRSPGSRAEPQPAIAAPIVDPHRSILDDARFTSPAPATTSADDRFTVATTDPEGEINEQNVERVIRQVLERLGSNSLDKAIKTMILAKVTGHVVATQKCDELRGSNLLLITQLDDNQQLMRTAPGSLSIASVQAFMTLCWRRSTSHSIKIVTKRCQWSPLSRRFFGTLKEVKKPMSEFLLKPRICFGQDALSVLDELTACHVLLVTDQAMVKFGLAERVTQRLCARGIDWQVWDDVVADPDIATVVRGMKLMDSCYPDLVIALGGGSVIDAAKAVIFALAQTRPEAGRERPCFVAIPTTSGTGSEVTSFSVVKAHAEKLVLVDSSLLPDIAILDPSLVASVPPAITADTGMDVLCHALEAYVSLAASDFSDALAEKVVQQVFSYLPGCWRNGQDLQAREKMHNASCMAGMAFTNASLGITHSLAHALGGVFRVPHGRANALLMAHVVAWNADYHGQCDTLAARKYARLAHLLDLPASTPREGVTSLLVAIQTLKDEMNMPRG

SEQ ID NO: 1354 - DNA, 1716 bp, Escherichia coli
aaaggggggggggggggttaggtgtaaatataataattttttctcttaataaccaaacaaaccctttttttttttttttctccgccaccaaataaaaaaaaaatagggaggtgggttcccccaaccggagaggtcttcccccccaaccccccccccaatattttttaaaattttggggaaaacacgcgggtcggggggccttcccaggggcccccagggttgcggtttgggaaatgcgacgatgaagccgtttttgaatgttatcttcttgctgaaggggaaggggaactgaaagaactgagcctgtcagagctggaagagcgggcgctgatgtatgcggcagacagtttccgttatgaatgataagtcagttataccggtaatggtaaacggagccggtatccgggatacaaggggcagagagtatgctgattattattatgacccgggacagatatctggaatatggcctgatgcgtatactgagcggatatcaggtcacgacaggcagagagctgtttaatgccggaaagcaacgtcagtcacttcccgaagacagttatgtgattctctgtgaccgtaatctggaaaggcttacatactctatgttctgtgggcgtcggtttcttgtcattcctgtttcctctgtgagatgcctgacagatatcaggcaaaccatccgccgtggagcgtggctgttcggacatacggcaaggccactgacccggacagagatggtggtggtcttcggggttgttttccatgactacgggtttacctttctggcagaccggctggggataaccatgaagacggtatgtgcgcatctttacaatgcgatggagaaaaatggtatgcgcggcgtcagtattaaatatctctgcaacaccatagaccggtaaaaagatggttttctgataaaggctgttgcgacggggatttctgtgcatgctgtgtcacgggcatcccagttctccggataattaatgttatgtagtcaggcgtgataaatttcatatggaacaggtatgcgttttatttgtgataaccagttaatgaggtgtttccatacacactgaagttaacctgtaatattagcgggggatttgaatgatgttgcgtggtctgcgaccactcgtttattcatgcaaataagtggactgctggatccacggtaagagtacagcgagggccgtattgacggggatgtgttattcagcgggcagtgctatgcgccacggaagcagttcgctgacatggttgaccggccagtcagctatgacgccaaacacatggcgaaggtagttttctggatcctcgtcgttcagtttgcacgtcccgatcaggctgtacagtagcactccccgctcaccaccatgctcagagctgcgtattaccgtgaaggagatcggtgagtaaccctctgtgtcggcacattatagccgtcacatcggataactgttatccttctgttctgatgtattctgggaggtgatgtttcactcctgataagagcattactaattacagctgcttttcggataacattcgggcagttttctttaattctgaagtctgaaagagatatcagtaattgtattgcttttaaacattgtcagtatttatttgtccaaatcgttcacgtttctcataatcttcccgacagtcaccatcacaaaacaatccagtcttaacaggttctccgcagttatagca

SEQ ID NO: 1355 - DNA, 474 bp, Escherichia coli
atgctgattattattatgacccgggacagatatctggaatatggcctgatgcgtatactgagcggatatcaggtcacgacaggcagagagctgtttaatgccggaaagcaacgtcagtcacttcccgaagacagttatgtgattctctgtgaccgtaatctggaaaggcttacatactctatgttctgtgggcgtcggtttcttgtcattcctgtttcctctgtgagatgcctgacagatatcaggcaaaccatccgccgtggagcgtggctgttcggacatacggcaaggccactgacccggacagagatggtggtggtcttcggggttgttttccatgactacgggtttacctttctggcagaccggctggggataaccatgaagacggtatgtgcgcatctttacaatgcgatggagaaaaatggtatgcgcggcgtcagtattaaatatctctgcaacaccatagaccgg

SEQ ID NO: 1356 - protein, 158 aa, Escherichia coli
MLIIIMTRDRYLEYGLMRILSGYQVTTGRELFNAGKQRQSLPEDSYVILCDRNLERLTYSMFCGRRFLVIPVSSVRCLTDIRQTIRRGAWLFGHTARPLTRTEMVVVFGVVFHDYGFTFLADRLGITMKTVCAHLYNAMEKNGMRGVSIKYLCNTIDR

SEQ ID NO: 1357 - DNA, 201 bp, Escherichia coli
ctgctgactgtgtctgaatacgttgataatacgatctacgggaagaagtccccgggcttacttgatactgtgaatcctggacataagtgaacccaccgccatcataaaatgctaacgcagaaccgccgcctcctggccaacgaataccattaccatgagtatgatcaccggcagaccccgtagagccactcagactgtgcg

SEQ ID NO: 1358 - DNA, 5873 bp, Escherichia coli
cagttgttggttacgttcaaggccaaaacgctgataccacggcgctaccttctcggatacggtattgcaggcgttccagttcgccctgcagggtatgcagcgccaccagttgttctgccagcggcaggcggttatcgagcgcacgctccgtgtggataccggtttcctgaacaagagcgcggttggcgaaaaacgaggtcgtgattccggccccccatatcaccagcacgcagacagcggacatcagtgcggtccgcagccacggaaaacccaccgtgcgcccgctcgcgttatcacccgtcacgcccgcccagaccggtgacggcagtcactcatgaggtgcggcctccggcactgtggaaagcggagggctgaacatcaggccacgcaggcgcagggaagaaaatgcgccgcctgccagcagcggtttcagaacgctttgccagtgagcgataccccgctctgcaagggtatgggccagacgcagcaggaaatcatggcggttatccgccagcagttgcgacatgccctgttccgtcagcggcagggtttgtgcttccagcattacagccagttgttccggggtacagcgttccggcagcaggcagccgacgctttgcagggggcgtccggtctgataatcaccgtcgtcacagacctgccacaaatagagtggagcctgaaaaccgagtcgcttaccgccgtttatcagttcgcgccagcctttgtcgagttgtgcggtctggcggctttgttcttctgtcagcggccagatgatgccgtccagcggacggctgcggcgcagtttttttaaggcggtcagcagtgtgacatcaggctccgctgttggcctgccgccatatatcagcacggtgtggtcgccctccagccagtgttgcccggtcagccccggcgcgatggcctctgcctcttcaggctcgccggtcaccagcagcaggcggactttacgccgccagaacggaccatagcgtaaccgaatatttgagctgagatcggttaaaatatcctctgatggagaagatacgggttggtcgttttctgccgaattttttggtctgtaaataaattgcgctttcctttgcttccggatccaccagaacggcgaacacacaaccccaagtaaaaaaagagaaaataatcccgcccatattccccatatcagacgagcagacactccgctctttatcagaacatcctgattaataataattaacagagcgcaaatccctgccaaaccaataatcagaattaaatatccccagaaaccgtaacgctgagtatgcattatttttcctcatgtccttaaataaagcttccgggtaatcaggcaaaggctctttttctgagcatactgtgctgactgatagataattaaatgattttgttcagtttctttggcagcctctgacagcattgccagagagacaggaaaaataaactctcctgtagggccaaaggaatgatcaatcatgtgtaggggccgttttttaggaagtgaccattgatgttgttcagcatactgcataaggttttctatcgttccctcatctaaaccagagacccagacatgctgtagttgtttgttatccaattggttatattcaaataacacatccagattatgctccaactcctcgggttctaatggcattacacgccccagaccagcaataacgggtatctggtgctgccgtacaaatgacgatgaggagataagctgtgctgataccagttcactcgtatcttcaggtttattctccggccagttttgtaaacaaacaaccagaattagaccgtcaaatctttcatcataaagagactggatttgattaagagtattggtccgttcaggtactaagtcccattgatggaaaatagcctgtctcacggtttctccacgccatttctcaggctgtaatacgtagatagtatgtagataatgacgataatcaggaaattgttgtgtcagttgctggtgaatatcatggaatatagacgaaagagaataacgggatgcagagaataacggtcgtgcctttttaggatatgcagggatctcttcctgtggccccagtaaaacactcatgcctttttcttccggtgtaaaaagaacattcccaactattgccagttgtttttggctccagtgttgccagagttgtttaacttgttgtctttcagactcccaacttatacaggctgcaacggattgttcatatttgttcagcgcaataccaaacaaacatagccaaagaaacagcattggcagaacgccataaataaaaatatcccagtatgtcgcagaattccagaccgataaaataaacagagtaccaactgttaacatagatattaataatataatccagcgtcgataaacaggctcaggtagcatttttctttctggaatatcgggtacaggccatcccatattatgactcgatactattttctggttgagaactgataaccctacagccacatgcacattggcaatgattaacaacgacattacgacctttttccgtcgctgtcgggtcaccttcttgtatgggattcacgccgtgctttgggcaggaaaccagatcacctacgagagctacctgaatgccattgataaaaagcgttgaagttgcggtaatcaccttaccaccatgagtcgtggcatcacctaaacaaacgatcccaggcataatttttacctctgatttatttacaacaggaaaataatttaaaaaatgaaagtatagttgcctattcccggtcattgatataaatgagataccattatctttatgttttgtgagagggggtatttcagcgtactggtcatttgctgcaacacggcaaccagttcatgttcggttaagacttcttttgaattcagaaggtctgatgctataagtcatcgtaagtattaaccgttgaccaccattctttttatcatcatggactgtcagataaaacctgtaattttgcagcgggtcagtacttagcgtgatctgctgtttaatctactatacccgataaacttgaagatgcacgtaaatgagttctgtagcccaagccctttccgacaagggccttgtgcgtaccatgcaacttgaagtaccacgagtatattccgatatctccagactgttctgattatctgctttaccactgcgtgggatgatatttaattgtccctgttatactttcccacagcgccatcagttcatgttcagttaatgcattgtcagcgtgtaagatgtcaacactgtaattcataacaagttttaataactgtttgttgtttttcttatcctcatggattgccagattgaattcataatctcgtgatggttctgagttcaacattatttgcttacgaacccaccattcagatatctccagaccattaattttcttacgacctttatatagagttataccatgctctgtttccattactcggatatcttatatctaataatgagtcaatataactattattatccgtctgcaaacttattttaatattattgctatttttataatctacagataattcatactctccaagtagtgaagcgtcaacctgtgcatattgtatcgccaatttattttctgatgggggttggttatctgcacgaggttgtagtcctgaaagaatagtaagtaactgtacttttttttctggaatattatatccataactgtattcggcaatcttactaattccatcatagcgggttgctctaccatctttagcttctatttttactgaaaacgtaacgccattttcccatttccatgcatccaatactcgtgcaaaatctggggtgtatttcgctttcattcgttcaaaaatgactccattcataggtggacttagtgggtgaacttgcttcaaataaggcgtatccagtggatctaatgctgaggtgttttttagttctgcctcatatcgtgtcatatattgcagaaaaggaggataatattgtagctttgtttctacagggatcatcgccgatccttgtatgaacataaccattcctgttggtttgtaatcagccggaagttctatggaataaaatccaaagtaccgagtttcaggatgttgtgataacattatgagcatctctttttctttatcatttagtgaataagtatatgctttaggtctgaatataatccatccaataaggactataaaaacaatcagcagacatttatttctacggttaatcagagtatgacattttaccatccttttttacctcctgagctatttttataatagaacgtaatgcaaatgcctgactaacgggatttcgataagcagcctcgtgagaaacctgtacagccaaacgctctaggatgttcttgtgtacgatttgtcctgcacgaagaggtactgtaccatccccgttttcacaagagtctcgtaatgtaaaacgctgtcctatcttaacatatgtatcaccgtcgtcagtatttatttcccacgcctgttcttcaggagaaaattcatccttaatagttctaatgttaccaacttcatttaaatcaagacgaccatcaatgaattttggttctaaagatatatcacttttttttcccattgataatgagcctttccaaagaacattttcctgcgttaaatgcgcttcaggaatatctcccaatttcgctctcccatagaaagagtaagtattgatatgatattttccagcaatttgcttatgaaatggattgacactctcagtaattaaattttcatatatattccaatcagtatcaatttgcttttgatttaatgaagtattaaaaggattcaatagattctcatccaccaatttccaccaattttctctatttagataaagttcagcgtaggtgcgttcttcgggggcaataccttctttaatgggaagatttttagggagcgttaatgtactaccatcacgatcgacaatattaagccactcttcaccataatcattcatgggtagtaattccattggtcctggcgactgggaaaaaacagctaccatttcagctgcattacgacctaagatatgactgataacatacccttccggatttgactctgggttttcagttccacgtttcattcgggtatatgtcgccgcagcaccaattgatggtaatacgccatgaacaataccgtagacatccgtattccccgaaagacactctgaaaagtaccttgccactagtcctcccattgaatgcgtaaccagaataactttatggcatttcattcctcgtttttgatagcctccaacaattttcttgatctgttcttgtagtctgattgctgagagcatattagaaccaagccagttatagccaacgacatggaccggaaattgatacaaccttatgacttcaagatactcttcatcaagtgagtcaggaccatactccaaacccaaaggtacatcgagtagttgctggtaggtcgcacttaacgtctcacctttctttgtaggtttgtcccggtacaatgctgtttgtaatacatcgagaaaggaaccgtagctagcatttgcaacctctccccagccgcgatcttttcttgaaccaaataatttcgcttctggctctatattatccaaaatgtcacgtactgcctgagtgtaattatccattgcttctttatcggatgggtcctccggatattgttgacctaactgaataagtttttcttgggcatccggaggtgcgggaattctcccacgattatcgacctccaccctgtcaggatgcaataatcttttcctctcttttggtcctgatgtaggtagtgaccagcccatcagactcatagagtcatcatatcg

SEQ ID NO: 1359 - DNA, 1623 bp, Escherichia coli
cgatatgatgactctatgagtctgatgggctggtcactacctacatcaggaccaaaagagaggaaaagattattgcatcctgacagggtggaggtcgataatcgtgggagaattcccgcacctccggatgcccaagaaaaacttattcagttaggtcaacaatatccggaggacccatccgataaagaagcaatggataattacactcaggcagtacgtgacattttggataatatagagccagaagcgaaattatttggttcaagaaaagatcgcggctggggagaggttgcaaatgctagctacggttcctttctcgatgtattacaaacagcattgtaccgggacaaacctacaaagaaaggtgagacgttaagtgcgacctaccagcaactactcgatgtacctttgggtttggagtatggtcctgactcacttgatgaagagtatcttgaagtcataaggttgtatcaatttccggtccatgtcgttggctataactggcttggttctaatatgctctcagcaatcagactacaagaacagatcaagaaaattgttggaggctatcaaaaacgaggaatgaaatgccataaagttattctggttacgcattcaatgggaggactagtggcaaggtacttttcagagtgtctttcggggaatacggatgtctacggtattgttcatggcgtattaccatcaattggtgctgcggcgacatatacccgaatgaaacgtggaactgaaaacccagagtcaaatccggaagggtatgttatcagtcatatcttaggtcgtaatgcagctgaaatggtagctgttttttcccagtcgccaggaccaatggaattactacccatgaatgattatggtgaagagtggcttaatattgtcgatcgtgatggtagtacattaacgctccctaaaaatcttcccattaaagaaggtattgcccccgaagaacgcacctacgctgaactttatctaaatagagaaaattggtggaaattggtggatgagaatctattgaatccttttaatacttcattaaatcaaaagcaaattgatactgattggaatatatatgaaaatttaattactgagagtgtcaatccatttcataagcaaattgctggaaaatatcatatcaatacttactctttctatgggagagcgaaattgggagatattcctgaagcgcatttaacgcaggaaaatgttctttggaaaggctcattatcaatgggaaaaaaaagtgatatatctttagaaccaaaattcattgatggtcgtcttgatttaaatgaagttggtaacattagaactattaaggatgaattttctcctgaagaacaggcgtgggaaataaatactgacgacggtgatacatatgttaagataggacagcgttttacattacgagactcttgtgaaaacggggatggtacagtacctcttcgtgcaggacaaatcgtacacaagaacatcctagagcgtttggctgtacaggtttctcacgaggctgcttatcgaaatcccgttagtcaggcatttgcattacgttctattataaaaatagctcaggaggtaaaaaaggatggtaaaatgtcatactctgat

SEQ ID NO: 1360 - protein, 541 aa, Escherichia coli
RYDDSMSLMGWSLPTSGPKERKRLLHPDRVEVDNRGRIPAPPDAQEKLIQLGQQYPEDPSDKEAMDNYTQAVRDILDNIEPEAKLFGSRKDRGWGEVANASYGSFLDVLQTALYRDKPTKKGETLSATYQQLLDVPLGLEYGPDSLDEEYLEVIRLYQFPVHVVGYNWLGSNMLSAIRLQEQIKKIVGGYQKRGMKCHKVILVTHSMGGLVARYFSECLSGNTDVYGIVHGVLPSIGAAATYTRMKRGTENPESNPEGYVISHILGRNAAEMVAVFSQSPGPMELLPMNDYGEEWLNIVDRDGSTLTLPKNLPIKEGIAPEERTYAELYLNRENWWKLVDENLLNPFNTSLNQKQIDTDWNIYENLITESVNPFHKQIAGKYHINTYSFYGRAKLGDIPEAHLTQENVLWKGSLSMGKKSDISLEPKFIDGRLDLNEVGNIRTIKDEFSPEEQAWEINTDDGDTYVKIGQRFTLRDSCENGDGTVPLRAGQIVHKNILERLAVQVSHEAAYRNPVSQAFALRSIIKIAQEVKKDGKMSYSD

SEQ ID NO: 1361 - DNA, 831 bp, Escherichia coli
atggtaaaatgtcatactctgattaaccgtagaaataaatgtctgctgattgtttttatagtccttattggatggattatattcagacctaaagcatatacttattcactaaatgataaagaaaaagagatgctcataatgttatcacaacatcctgaaactcggtactttggattttattccatagaacttccggctgattacaaaccaacaggaatggttatgttcatacaaggatcggcgatgatccctgtagaaacaaagctacaatattatcctccttttctgcaatatatgacacgatatgaggcagaactaaaaaacacctcagcattagatccactggatacgccttatttgaagcaagttcacccactaagtccacctatgaatggagtcatttttgaacgaatgaaagcgaaatacaccccagattttgcacgagtattggatgcatggaaatgggaaaatggcgttacgttttcagtaaaaatagaagctaaagatggtagagcaacccgctatgatggaattagtaagattgccgaatacagttatggatataatattccagaaaaaaaagtacagttacttactattctttcaggactacaacctcgtgcagataaccaacccccatcagaaaataaattggcgatacaatatgcacaggttgacgcttcactacttggagagtatgaattatctgtagattataaaaatagcaataatattaaaataagtttgcagacggataataatagttatattgactcattattagatataagatatccgagtaatggaaacagagcatggtataactctata

SEQ ID NO: 1362 - protein, 277 aa, Escherichia coli
MVKCHTLINRRNKCLLIVFIVLIGWIIFRPKAYTYSLNDKEKEMLIMLSQHPETRYFGFYSIELPADYKPTGMVMFIQGSAMIPVETKLQYYPPFLQYMTRYEAELKNTSALDPLDTPYLKQVHPLSPPMNGVIFERMKAKYTPDFARVLDAWKWENGVTFSVKIEAKDGRATRYDGISKIAEYSYGYNIPEKKVQLLTILSGLQPRADNQPPSENKLAIQYAQVDASLLGEYELSVDYKNSNNIKISLQTDNNSYIDSLLDIRYPSNGNRAWYNSI

SEQ ID NO: 1363 - DNA, 975 bp, Escherichia coli
atgcatactcagcgttacggtttctggggatatttaattctgattattggtttggcagggatttgcgctctgttaattattattaatcaggatgttctgataaagagcggagtgtctgctcgtctgatatggggaatatgggcgggattattttctctttttttacttggggttgtgtgttcgccgttctggtggatccggaagcaaaggaaagcgcaatttatttacagaccaaaaaattcggcagaaaacgaccaacccgtatcttctccatcagaggatattttaaccgatctcagctcaaatattcggttacgctatggtccgttctggcggcgtaaagtccgcctgctgctggtgaccggcgagcctgaagaggcagaggccatcgcgccggggctgaccgggcaacactggctggagggcgaccacaccgtgctgatatatggcggcaggccaacagcggagcctgatgtcacactgctgaccgccttaaaaaaactgcgccgcagccgtccgctggacggcatcatctggccgctgacagaagaacaaagccgccagaccgcacaactcgacaaaggctggcgcgaactgataaacggcggtaagcgactcggttttcaggctccactctatttgtggcaggtctgtgacgacggtgattatcagaccggacgccccctgcaaagcgtcggctgcctgctgccggaacgctgtaccccggaacaactggctgtaatgctggaagcacaaaccctgccgctgacggaacagggcatgtcgcaactgctggcggataaccgccatgatttcctgctgcgtctggcccatacccttgcagagcggggtatcgctcactggcaaagcgttctgaaaccgctgctggcaggcggcgcattttcttccctgcgcctgcgtggcctgatgttcagccctccgctttccacagtgccggaggccgcacctcatgag

SEQ ID NO: 1364 - protein, 325 aa, Escherichia coli
MHTQRYGFWGYLILIIGLAGICALLIIINQDVLIKSGVSARLIWGIWAGLFSLFLLGVVCSPFWWIRKQRKAQFIYRPKNSAENDQPVSSPSEDILTDLSSNIRLRYGPFWRRKVRLLLVTGEPEEAEAIAPGLTGQHWLEGDHTVLIYGGRPTAEPDVTLLTALKKLRRSRPLDGIIWPLTEEQSRQTAQLDKGWRELINGGKRLGFQAPLYLWQVCDDGDYQTGRPLQSVGCLLPERCTPEQLAVMLEAQTLPLTEQGMSQLLADNRHDFLLRLAHTLAERGIAHWQSVLKPLLAGGAFSSLRLRGLMFSPPLSTVPEAAPHE

SEQ ID NO: 1365 - DNA, 1098 bp, Escherichia coli
atgctacctgagcctgtttatcgacgctggattatattattaatatctatgttaacagttggtactctgtttattttatcggtctggaattctgcgacatactgggatatttttatttatggcgttctgccaatgctgtttctttggctatgtttgtttggtattgcgctgaacaaatatgaacaatccgttgcagcctgtataagttgggagtctgaaagacaacaagttaaacaactctggcaacactggagccaaaaacaactggcaatagttgggaatgttctttttacaccggaagaaaaaggcatgagtgttttactggggccacaggaagagatccctgcatatcctaaaaaggcacgaccgttattctctgcatcccgttattctctttcgtctatattccatgatattcaccagcaactgacacaacaatttcctgattatcgtcattatctacatactatctacgtattacagcctgagaaatggcgtggagaaaccgtgagacaggctattttccatcaatgggacttagtacctgaacggaccaatactcttaatcaaatccagtctctttatgatgaaagatttgacggtctaattctggttgtttgtttacaaaactggccggagaataaacctgaagatacgagtgaactggtatcagcacagcttatctcctcatcgtcatttgtacggcagcaccagatacccgttattgctggtctggggcgtgtaatgccattagaacccgaggagttggagcataatctggatgtgttatttgaatataaccaattggataacaaacaactacagcatgtctgggtctctggtttagatgagggaacgatagaaaaccttatgcagtatgctgaacaacatcaatggtcacttcctaaaaaacggcccctacacatgattgatcattcctttggccctacaggagagtttatttttcctgtctctctggcaatgctgtcagaggctgccaaagaaactgaacaaaatcatttaattatctatcagtcagcacagtatgctcagaaaaagagcctttgcctgattacccggaagctttatttaaggaca

SEQ ID NO: 1366 - protein, 366 aa, Escherichia coli
MLPEPVYRRWIILLISMLTVGTLFILSVWNSATYWDIFIYGVLPMLFLWLCLFGIALNKYEQSVAACISWESERQQVKQLWQHWSQKQLAIVGNVLFTPEEKGMSVLLGPQEEIPAYPKKARPLFSASRYSLSSIFHDIHQQLTQQFPDYRHYLHTIYVLQPEKWRGETVRQAIFHQWDLVPERTNTLNQIQSLYDERFDGLILVVCLQNWPENKPEDTSELVSAQLISSSSFVRQHQIPVIAGLGRVMPLEPEELEHNLDVLFEYNQLDNKQLQHVWVSGLDEGTIENLMQYAEQHQWSLPKKRPLHMIDHSFGPTGEFIFPVSLAMLSEAAKETEQNHLIIYQSAQYAQKKSLCLITRKLYLRT

SEQ ID NO: 1367 - DNA, 258 bp, Escherichia coli
atgcctgggatcgtttgtttaggtgatgccacgactcatggtggtaaggtgattaccgcaacttcaacgctttttatcaatggcattcaggtagctctcgtaggtgatctggtttcctgcccaaagcacggcgtgaatcccatacaagaaggtgacccgacagcgacggaaaaaggtcgtaatgtcgttgttaatcattgccaatgtgcatgtggctgtagggttatcagttctcaaccagaaaatagtatcgagtca

SEQ ID NO: 1368 - protein, 86 aa, Escherichia coli
MPGIVCLGDATTHGGKVITATSTLFINGIQVALVGDLVSCPKHGVNPIQEGDPTATEKGRNVVVNHCQCACGCRVISSQPENSIES

SEQ ID NO: 1369 - DNA, 291 bp, Escherichia coli
atggaaacagagcatggtataactctatataaaggtcgtaagaaaattaatggtctggagatatctgaatggtgggttcgtaagcaaataatgttgaactcagaaccatcacgagattatgaattcaatctggcaatccatgaggataagaaaaacaacaaacagttattaaaacttgttatgaattacagtgttgacatcttacacgctgacaatgcattaactgaacatgaactgatggcgctgtgggaaagtataacagggacaattaaatatcatcccacgcagtgg

SEQ ID NO: 1370 - protein, 97 aa, Escherichia coli
METEHGITLYKGRKKINGLEISEWWVRKQIMLNSEPSRDYEFNLAIHEDKKNNKQLLKLVMNYSVDILHADNALTEHELMALWESITGTIKYHPTQW

SEQ ID NO: 1371 - DNA, 225 bp, Escherichia coli
atgtccgctgtctgcgtgctggtgatatggggggccggaatcacgacctcgtttttcgccaaccgcgctcttgttcaggaaaccggtatccacacggagcgtgcgctcgataaccgcctgccgctggcagaacaactggtggcgctgcataccctgcagggcgaactggaacgcctgcaataccgtatccgagaaggtagcgccgtggtatcagcgttttggcct

SEQ ID NO: 1372 - protein, 75 aa, Escherichia coli
MSAVCVLVIWGAGITTSFFANRALVQETGIHTERALDNRLPLAEQLVALHTLQGELERLQYRIREGSAVVSAFWP

SEQ ID NO: 1373 - DNA, 4737 bp, Escherichia coli
tcgcgcagcgcgttaagttgccacagataacccctggatttgagtccgggggtttttgtttacgctatcttgtaggacaagagatacatccggcatttgtcctttacaggaaattatagcctttcaacatttccttgatgtcttcaacgatcgcgtcgtttggcatatgaattggtctacgtgtaatacctgccttcacacccatcaggtttaatgcttccttcattactgcaggcgcggtcattttcttgatcgtcatgcgcagtgcatccattttattacgctcttcctgcgccttctccatttcaccggccatgaagtaattatataaatcgacttcaatcgtaggcagaacattcgacgttgcagcgacagcagccacagaaccttctttaaatgcatccagcattaacgagtcagagccgtttaataccttaaagtttttatgtttagcgatttccagatactgtttctggacttcgaatttaccgctactgtcttttatcgctacgatatttttgatatcggctaaacgatttgccggttcggattcgatgcttaatcctgtctggcccggcaggttatagagaatgatgggggctgttgtgctaaaggcggtatcgtaatagggacggtataaatcttcctgatttggtaccagatagtacggcgtgacaacagaaatataatcggcacccgcatcaactaaccgtttagtcaattcgatggtttgttttgtgctgcagcacccagcacctgcacaaatggtaacttcattaccgacctcttcaacgacggcttttgttaactcaactttttcgtcatcggaaagcaaatggaattcaccattagttccgcaaatgaataaaccatgaacaccattatctactaaccagcgcgccatttttttcgccgcagtgatatccattttttccgtttcatcgaaaggcgttaccattgcggtaataatccctttgagctctttcattactctttctccagttcctgtaatacgtttttaatagaaatttgcattgtgttatggtcggcctcatcggtaaatgaagcggcatgaggggtaatagaataatttttaagttcggtgagttcttttgaacgttctctcagttcaatatcttcactggcaaaagcaattttctgattgctaagtgcggtatataaacttttctcatcgaccaatccacccctggctgtattgattaaaatagccgaagatttcattttctcaaatacagagtcgttaattatattgcgagtactgtccagtaaaggtaaatgcagagaaattacatcgctgtactgatatatttcatcaggtgatttaagttctatataggatggaaccttgcttttatcaatatgaggatcatgagcagtaatcgtcattcccatagaatgagcaatatgagcaacatgttgaccaattgcaccaagtccaattaatcccagatttttttgatatagctcatacccgacaagcctgatgtccttaccatttcttgcctgactctcgatttcaacatattttcgggaactggagagcatcatcagaatggtcatttctgcaacagaaatagagttagcattaagagctttatgtaccacgatgtctttactatttgcgtaatcgacatctatgttatctaaccctacgccatattttgaaataaccttcaggttttttgcctgatcaataacttctctgctcagaggatcgtttccggtgataatggcattcgcgtctttaattttctcgatgagttcttccttgctatatcgacctccactgttattacattcaacttgataacctgcggattttaacttatcaatatagaccttgcctttacccacaaaaggccggggagtgataattatctttttcattttataaaaggccaaagaaagaaaatgcaagactcaaaacaagaatagtgaccagaatacgtaagaaatgagggccacatttttgtatgtaaaaataaatacccaacacggcaataagtggcaacatgttagggacaattttatctagcatatcctgtaagacaatggtattgccaccgccggttgtaatatgcaatggcgtcttaatttttacatacgttgctgaaagcgcccccatcatcaacagcccgaacattccagcaccttcgataattcgatgtatgctcccggaatgcaagatttccagaattgactctttcccttttttatagccgatattaagagcaaatcgactggcgaagaacatataactaacctggtaaatcagggggagaagtgcagcaataacatatccctgaataacaaacgggatacagacaccaataacaatgggacgcaatgtaccaaagtctaacgtgtcaccaatacccgatacaggccccataagaccagtttttaaacccgtaacaagttgtgttgttgattcacgttgttcttctgattcctgggcggctttttcctccagtgcaatactaataccagcgataaccgagccccagttagcctgtgtgttgaacatggttaaatggcgctgtaaggctttggcgagatctttttcatctgggtatagcttcgccaatacgcctgtcattgcattgcaaaatgccagtgcttgtaaacgttcaaagttcaatgatgtttcagagaacgcgtgccattttagccaaacaatctgaacgtctcttttcgtaataggggaggattctgagtatcctgactcaattatattatccatttttagttccttttgtattttgtgactgcatatataagaggacggcacagagtccaaaaatatagatgccaatggtattcaagcctgaataggtcacgaggaaaaagccaataatgcacacagggatgtattgtttcttaccgataacaattatggttatcgcaaaacccagtgcaggcagaatattaccggcaattgccaggccattcgtcgaccaggcggcatgcaggtttacaaaagaggcaatggcatccgggccatacaggcaggcgatgaataccggtacaaaacgcatcggaaaggctaacaggagaggatatattgtggctgcgcgttggatgccttttatatcacctttttctgcgtagcgatcagccatgtggataaatgtggtattcagtgttttacgtacgttttccagaacaacgccgagcaatcccagtggaatagccaaagagatagcaatttctggtttaatacctgcggtaagtgcaattggaattgctatacacgaggctagaccttcatctgcaggaggatttcctcccggggcaatactcccgatatagatcatctgtaaggtggccccaacagataaagcagttggcatatcattaaagatgagtcccataataggtgctatcgataatggcatacgcataatagaaaagccgtaccatacttttgcttgggatatccaatataccagggcaatcattgctgctgtaaaaatagacataagctcctctccttaattaaggtaacttatttttgattttttgtaggctggcaggatcttcttcaggaatagtttggaaataaactttgatattcttatcttcgatgatttgaagtttgtcggcatcttcgtggttgagtgatatttggttaaagacaatttttcttcccggagtattttcaacaccaccgacttgtaattcctctaacatcaaaccaccttgtatagtttttaatgcagaatcgatcgatttgaaaagaattagtaatttaccttcatagaaactattgctgttccagcgttgtaacgtatcttcaatggaggtcattatgacttcaacaccacttggcgctgccatcttatagacttcagccaggaaaggatcgcgtgacaagggatcatcaataacaattattttatttgcatcactcctttttagccattttgttatgacttgtccatgaattaaacggtaatcaatacgggcatgtactatactcatagtttatcatcctttattaaaacaataagtttgaatcatctctttaccagcatcatgtatatgctgaatatattcatcaaaggactgttcttcgtcagaatcctgtaacatgttggcttcaattaacattgccagattgacaccgctgatgcagcgaatgggaaattctcgtgaaagaaggtaggcgatatttgaaggtgtgccgccataaatatccgtaaatatgattgtttctacatcaggattgagtatggtttttacttgttgcataagtgcttcaggtgacattcccggcatcagagaaatagctgtagtatgcggtgttttacctacaatcatttcgctactggcgagtaaagcattccctgcctcaccgtgtgtcagaattataatattgaactggttcaaatgataaattccttttaatatgtacagaggatagataataaataatattcaacacatgaatgtttttagctttcagcaaggtaacctttggcctttgattatattgtttttatttggcgataatgttagcaagatcacagttgatagcattagctaaaattgctaataaattgtttgtaataaaaaacagggcttatgatgtgctgttcatcataattaatgataattgaatacttttatatttatttaatgaatatattccagtgaaccaaaaatacgtcgagtaaataaatcaacacttatgatttataagaattatatata

SEQ ID NO: 1374 - DNA, 882 bp, Escherichia coli
atgaaagagctcaaagggattattaccgcaatggtaacgcctttcgatgaaacggaaaaaatggatatcactgcggcgaaaaaaatggcgcgctggttagtagataatggtgttcatggtttattcatttgcggaactaatggtgaattccatttgctttccgatgacgaaaaagttgagttaacaaaagccgtcgttgaagaggtcggtaatgaagttaccatttgtgcaggtgctgggtgctgcagcacaaaacaaaccatcgaattgactaaacggttagttgatgcgggtgccgattatatttctgttgtcacgccgtactatctggtaccaaatcaggaagatttataccgtccctattacgataccgcctttagcacaacagcccccatcattctctataacctgccgggccagacaggattaagcatcgaatccgaaccggcaaatcgtttagccgatatcaaaaatatcgtagcgataaaagacagtagcggtaaattcgaagtccagaaacagtatctggaaatcgctaaacataaaaactttaaggtattaaacggctctgactcgttaatgctggatgcatttaaagaaggttctgtggctgctgtcgctgcaacgtcgaatgttctgcctacgattgaagtcgatttatataattacttcatggccggtgaaatggagaaggcgcaggaagagcgtaataaaatggatgcactgcgcatgacgatcaagaaaatgaccgcgcctgcagtaatgaaggaagcattaaacctgatgggtgtgaaggcaggtattacacgtagaccaattcatatgccaaacgacgcgatcgttgaagacatcaaggaaatgttgaaaggctataatttcctg

SEQ ID NO: 1375 - protein, 294 aa, Escherichia coli
MKELKGIITAMVTPFDETEKMDITAAKKMARWLVDNGVHGLFICGTNGEFHLLSDDEKVELTKAVVEEVGNEVTICAGAGCCSTKQTIELTKRLVDAGADYISVVTPYYLVPNQEDLYRPYYDTAFSTTAPIILYNLPGQTGLSIESEPANRLADIKNIVAIKDSSGKFEVQKQYLEIAKHKNFKVLNGSDSLMLDAFKEGSVAAVAATSNVLPTIEVDLYNYFMAGEMEKAQEERNKMDALRMTIKKMTAPAVMKEALNLMGVKAGITRRPIHMPNDAIVEDIKEMLKGYNFL

SEQ ID NO: 1376 - DNA, 918 bp, Escherichia coli
atgaaaaagataattatcactccccggccttttgtgggtaaaggcaaggtctatattgataagttaaaatccgcaggttatcaagttgaatgtaataacagtggaggtcgatatagcaaggaagaactcatcgagaaaattaaagacgcgaatgccattatcaccggaaacgatcctctgagcagagaagttattgatcaggcaaaaaacctgaaggttatttcaaaatatggcgtagggttagataacatagatgtcgattacgcaaatagtaaagacatcgtggtacataaagctcttaatgctaactctatttctgttgcagaaatgaccattctgatgatgctctccagttcccgaaaatatgttgaaatcgagagtcaggcaagaaatggtaaggacatcaggcttgtcgggtatgagctatatcaaaaaaatctgggattaattggacttggtgcaattggtcaacatgttgctcatattgctcattctatgggaatgacgattactgctcatgatcctcatattgataaaagcaaggttccatcctatatagaacttaaatcacctgatgaaatatatcagtacagcgatgtaatttctctgcatttacctttactggacagtactcgcaatataattaacgactctgtatttgagaaaatgaaatcttcggctattttaatcaatacagccaggggtggattggtcgatgagaaaagtttatataccgcacttagcaatcagaaaattgcttttgccagtgaagatattgaactgagagaacgttcaaaagaactcaccgaacttaaaaattattctattacccctcatgccgcttcatttaccgatgaggccgaccataacacaatgcaaatttctattaaaaacgtattacaggaactggagaaagag

SEQ ID NO: 1377 - protein, 306 aa, Escherichia coli
MKKIIITPRPFVGKGKVYIDKLKSAGYQVECNNSGGRYSKEELIEKIKDANAIITGNDPLSREVIDQAKNLKVISKYGVGLDNIDVDYANSKDIVVHKALNANSISVAEMTILMMLSSSRKYVEIESQARNGKDIRLVGYELYQKNLGLIGLGAIGQHVAHIAHSMGMTITAHDPHIDKSKVPSYIELKSPDEIYQYSDVISLHLPLLDSTRNIINDSVFEKMKSSAILINTARGGLVDEKSLYTALSNQKIAFASEDIELRERSKELTELKNYSITPHAASFTDEADHNTMQISIKNVLQELEKE

SEQ ID NO: 1378 - DNA, 852 bp, Escherichia coli
atggataatataattgagtcaggatactcagaatcctcccctattacgaaaagagacgttcagattgtttggctaaaatggcacgcgttctctgaaacatcattgaactttgaacgtttacaagcactggcattttgcaatgcaatgacaggcgtattggcgaagctatacccagatgaaaaagatctcgccaaagccttacagcgccatttaaccatgttcaacacacaggctaactggggctcggttatcgctggtattagtattgcactggaggaaaaagccgcccaggaatcagaagaacaacgtgaatcaacaacacaacttgttacgggtttaaaaactggtcttatggggcctgtatcgggtattggtgacacgttagactttggtacattgcgtcccattgttattggtgtctgtatcccgtttgttattcagggatatgttattgctgcacttctccccctgatttaccaggttagttatatgttcttcgccagtcgatttgctcttaatatcggctataaaaaagggaaagagtcaattctggaaatcttgcattccgggagcatacatcgaattatcgaaggtgctggaatgttcgggctgttgatgatgggggcgctttcagcaacgtatgtaaaaattaagacgccattgcatattacaaccggcggtggcaataccattgtcttacaggatatgctagataaaattgtccctaacatgttgccacttattgccgtgttgggtatttatttttacatacaaaaatgtggccctcatttcttacgtattctggtcactattcttgttttgagtcttgcattttctttctttggcctttta

SEQ ID NO: 1379 - protein, 284 aa, Escherichia coli
MDNIIESGYSESSPITKRDVQIVWLKWHAFSETSLNFERLQALAFCNAMTGVLAKLYPDEKDLAKALQRHLTMFNTQANWGSVIAGISIALEEKAAQESEEQRESTTQLVTGLKTGLMGPVSGIGDTLDFGTLRPIVIGVCIPFVIQGYVIAALLPLIYQVSYMFFASRFALNIGYKKGKESILEILHSGSIHRIIEGAGMFGLLMMGALSATYVKIKTPLHITTGGGNTIVLQDMLDKIVPNMLPLIAVLGIYFYIQKCGPHFLRILVTILVLSLAFSFFGLL

SEQ ID NO: 1380 - DNA, 744 bp, Escherichia coli
atgtctatttttacagcagcaatgattgccctggtatattggatatcccaagcaaaagtatggtacggcttttctattatgcgtatgccattatcgatagcacctattatgggactcatctttaatgatatgccaactgctttatctgttggggccaccttacagatgatctatatcgggagtattgccccgggaggaaatcctcctgcagatgaaggtctagcctcgtgtatagcaattccaattgcacttaccgcaggtattaaaccagaaattgctatctctttggctattccactgggattgctcggcgttgttctggaaaacgtacgtaaaacactgaataccacatttatccacatggctgatcgctacgcagaaaaaggtgatataaaaggcatccaacgcgcagccacaatatatcctctcctgttagcctttccgatgcgttttgtaccggtattcatcgcctgcctgtatggcccggatgccattgcctcttttgtaaacctgcatgccgcctggtcgacgaatggcctggcaattgccggtaatattctgcctgcactgggttttgcgataaccataattgttatcggtaagaaacaatacatccctgtgtgcattattggctttttcctcgtgacctattcaggcttgaataccattggcatctatatttttggactctgtgccgtcctcttatatatgcagtcacaaaatacaaaaggaactaaaaatgga

SEQ ID NO: 1381 - protein, 248 aa, Escherichia coli
MSIFTAAMIALVYWISQAKVWYGFSIMRMPLSIAPIMGLIFNDMPTALSVGATLQMIYIGSIAPGGNPPADEGLASCIAIPIALTAGIKPEIAISLAIPLGLLGVVLENVRKTLNTTFIHMADRYAEKGDIKGIQRAATIYPLLLAFPMRFVPVFIACLYGPDAIASFVNLHAAWSTNGLAIAGNILPALGFAITIIVIGKKQYIPVCIIGFFLVTYSGLNTIGIYIFGLCAVLLYMQSQNTKGTKNG

SEQ ID NO: 1382 - DNA, 891 bp, Escherichia coli
ttgaaccagttcaatattataattctgacacacggtgaggcagggaatgctttactcgccagtagcgaaatgattgtaggtaaaacaccgcatactacagctatttctctgatgccgggaatgtcacctgaagcacttatgcaacaagtaaaaaccatactcaatcctgatgtagaaacaatcatatttacggatatttatggcggcacaccttcaaatatcgcctaccttctttcacgagaatttcccattcgctgcatcagcggtgtcaatctggcaatgttaattgaagccaacatgttacaggattctgacgaagaacagtcctttgatgaatatattcagcatatacatgatgctggtaaagagatgattcaaacttattgttttaataaaggagaaaaaactatgagtatagtacatgcccgtattgattaccgtttaattcatggacaagtcataacaaaatggctaaaaaggagtgatgcaaataaaataattgttattgatgatcccttgtcacgcgatcctttcctggctgaagtctataagatggcagcgccaagtggtgttgaagtcataatgacctccattgaagatacgttacaacgctggaacagcaatagtttctatgaaggtaaattactaattcttttcaaatcgatcgattctgcattaaaaactatacaaggtggtttgatgttagaggaattacaagtcggtggtgttgaaaatactccgggaagaaaaattgtctttaaccaaatatcactcaaccacgaagatgccgacaaacttcaaatcatcgaagataagaatatcaaagtttatttccaaactattcctgaagaagatcctgccagcctacaaaaaatcaaaaataagttacct

SEQ ID NO: 1383 - protein, 297 aa, Escherichia coli
LNQFNIIILTHGEAGNALLASSEMIVGKTPHTTAISLMPGMSPEALMQQVKTILNPDVETIIFTDIYGGTPSNIAYLLSREFPIRCISGVNLAMLIEANMLQDSDEEQSFDEYIQHIHDAGKEMIQTYCFNKGEKTMSIVHARIDYRLIHGQVITKWLKRSDANKIIVIDDPLSRDPFLAEVYKMAAPSGVEVIMTSIEDTLQRWNSNSFYEGKLLILFKSIDSALKTIQGGLMLEELQVGGVENTPGRKIVFNQISLNHEDADKLQIIEDKNIKVYFQTIPEEDPASLQKIKNKLP

SEQ ID NO: 1384 - DNA, 675 bp, Escherichia coli; identical to SEQ ID NO: 154

SEQ ID NO: 1385 - DNA, 675 bp, Escherichia coli; identical to SEQ ID NO: 154

SEQ ID NO: 1386 - DNA, 4386 bp, Escherichia coli
attacgcaatgccgagctttgctcaacagcaggtagcagccgacaaccgccagtgaaggaactgaccgaacaccgcgttgcaggcggtttcgatgaacagcactacgccctggtaaccggcaataaaaaactcatcaataccctggcgcaacagatactcgaagcgcacttcaccgagagtattcaggaagaaattgctgacgagctgggttttgatctccagcaaatccgtaaacagcgcgacccgttatttcgcaaaaatgtattacgcgcttataaataccagtgcgcgatatgtggctttaatatgcgccacgacgacaccaccgtcgcgttggaagcggcgcatataaaatggaaacagcacggcggtccttgtgaaattcctaatggcctggcgctttgcgcaattcaccataaagcctttgataaaggatcgattggcctggacgaaaatatgcgggtactggtatcagatgcggtaaacggcggagggatcgttgagagattattctgggattttgacgggaaaactattacgttgccgcaggtgcgtaaaaattacccttttgaggggtttgtggagtggcatcggaaagaggtttttagggggtgaggttgataactatcgcagtatgttcaatattgctgacataatcagtgcaggatcttgccactagtttacaactcgccttcgatagcgacgcaaaacgagttctgttgccgatatcctcggctatggatattccaacagttccggcagagttgtttaccaagtttcaggtaagtttttactcagaaccggttgatgcggtttataaggcgctggatgtgaattaacacattcctcagcttatttacaaaaggattattcccatttgatataatatcagtgccaatttacttttttcaatggaatatatctcggctaaataacaataaaacttatcgctaatggattaaataaacaattttctaatttatttcaccacctttgatatagaaattgatggtgttgtcgctgccattgcttatggtgatgataaaatccacgtttctggatcggcgcgtagaaaatcatcactaccttgatattttgatgcgatatgatcataccgttccgtagtaccaatttcaacttcaggccaaaccccaacattaaaaaaattagagttattcactgattatattatcaataatataatcagtgaataacatggactatataataaattgctctaatcatttcccttacgaatatatggaccaaaagcccaagaatcataataagggtgatggactaatttttcattaaatcgaacactataagttaatttttttatatttttacgtacagcattaatactgggcaaagaggaaagataatctataaacttatcgatagtgatttccccttcgcaacactcaaacccatcaatgatatttttcgccatttttccattttcatttgtttgatatatcactccaggtattcgttgaaaaaaactagataatgcatatttatccgctacatatgtatcatccacatgatatttcccaccgagcatagttgtagtaacaataagcttatacacacctttgggttgccatgttgatggtagttcgaattctttaatgatcacatcaagatgattaagataatgttcagaaattcgatttatttgttgaaaataagaacgcataaatttattattatgatcatgtattaatgagctatctccaacgatgttacacacttgctgatagtacttaccataatatattggttgaccatttgattttagttctgtaaaaatcaaacaatcatccaggagaatcacgcaatcacactgataattagcatgagcatcaattggagaagctttaatccccgcatcacgaactcgttttataaattgttgctcatgaaatcgccctttacttgcttgagaaatttttttggaaccaaataatgacattagagagcgagtcactgagctatttgctattaatgcaggcattaagcataaaccgtccatacagggaataaatgggcaatcattaagatcatgtgattttgaattgaaggtaaaataatctatcagtttttttgctgcatctgctgcaatccccttacgttgaaagaatgataaccaactctcacggctttttatgatcagccagcgatccaactgtaggggtataggttttgtcgatgaaaatcttttgctcatttcttctttagataactcgactaaacattgataagcgtgcacccaattaaataatgatatattcccatattcttcatgaaggtcatcaggagacatattttccaactcgcttagatgaaatgagctaaaaacgccatcagaatttaagtaagatggcatatgatcctttacccaactatttagatgaaaatgtttgttactaaattcatgaacttcgctatatagatgtgacgctctcatcattagtctatttcttgcaatctcataatctcggtataaacaaaaactatcaacctcaagagagtaaatgttattatccaattttgtaaatactgcactacttagtctgaaaaagtctcttactctgcttaatgagtcaaaaacattccactcattaaggtaccctcccattgaaagcaaggtttgtttattcacacaagaagttagtttcaatggcccatgagtccgtaaataagaaaatattcttccggtgtaattggctacctcatcaaatgccctatcgataactcgaaaacattcgatatcaggttcagcatgaatattaatattttcagaaacgataaataatggaaaaatcctcttcatttttttaggatcattgaccacaaccaaggatgataatgatgataaaaacatctcacaaaacatgatgagattaagtattaatgcatgtgatttttttgtatttttacgccaaataccagcacattttgtagccgcaaagaaagaattatttatatcatgcataattttacattgactctcgaactcagagattagttcaatgttatcaggaaatgagtttactagctcattaatacattttttgaatgtattgttatactcaacttcagtctgaactgaaaatctattataatagatggaagatattctcagcacatccaaggcgatatctatactaatatcatctctttttatgtactcacaaaaaaagaacaaaactgtttcgggtcgttagcaagattactaattctagtggtatcataaactttttccatttttccatacatcctattgtctaaattactataaaactagccacttaactaataattataaatttcatcttttacaccttgcatttttataaccaatgaaatctacaacaatcaactgatggataatccgatattggtcgcatttaatggcatggtagcaaagttttcatcacatacctcctttgcaccagaataaacgccagagacctgaaattgcgagtacactacagaaattgtactgccggtcccatcagcataaaaccatagttacacaggtaatcatcattattcaccaagataataaatattattcggtagaatagcgttctcaggtggtcagtaaaattgtcttcaacaagatgtctgcgcatctcgtctgctagccctacataactgctctcgaccgaaactatttattgaatgttcaccaaggtgggcgtggagacaaaatgacgtcttttgatattagctacctgagccacatggtcaaaacgttcaagtagcatagcgaaaccaccctgcccacgtaatgtggacgatgcagcttccagccagagcaaacttgggaccatcgactacaaaatgaagaatactgaactgcttttctggcaggcctatatactgcacggatatgggtgatttcagacacaaaaaaagccgctcttgagcgactcgatttgcatacggtgtggtgcgaaggccggactcgaacatgcgatttaacctcatgatttaaaattgttaataataaacaacaccatcctataccaacacagataccaacacgaaaaatcactggttttcggcatcgaaccaggacaatcaggtcctgattgagataccgagctctgttactcgtcatctgcctcgacaggctccattgcatcaagtggtactcgcaccatcgcgatagatccaatccggataaaagcatcttccccatctatatcggttaactgatatcactcacttgatgccggataattgtgtcgattggcaacagtgtactctttcgtacagccagaatgtggcagactgaggtggaatagataacgtccgtatgcccgctgaccacctccgggcgggagagtgtggtatctgacatcatcatt

SEQ ID NO: 1387 - DNA, 612 bp, Escherichia coli
ttacgcaatgccgagctttgctcaacagcaggtagcagccgacaaccgccagtgaaggaactgaccgaacaccgcgttgcaggcggtttcgatgaacagcactacgccctggtaaccggcaataaaaaactcatcaataccctggcgcaacagatactcgaagcgcacttcaccgagagtattcaggaagaaattgctgacgagctgggttttgatctccagcaaatccgtaaacagcgcgacccgttatttcgcaaaaatgtattacgcgcttataaataccagtgcgcgatatgtggctttaatatgcgccacgacgacaccaccgtcgcgttggaagcggcgcatataaaatggaaacagcacggcggtccttgtgaaattcctaatggcctggcgctttgcgcaattcaccataaagcctttgataaaggatcgattggcctggacgaaaatatgcgggtactggtatcagatgcggtaaacggcggagggatcgttgagagattattctgggattttgacgggaaaactattacgttgccgcaggtgcgtaaaaattacccttttgaggggtttgtggagtggcatcggaaagaggtttttaggggg

SEQ ID NO: 1388 - protein, 204 aa, Escherichia coli
LRNAELCSTAGSSRQPPVKELTEHRVAGGFDEQHYALVTGNKKLINTLAQQILEAHFTESIQEEIADELGFDLQQIRKQRDPLFRKNVLRAYKYQCAICGFNMRHDDTTVALEAAHIKWKQHGGPCEIPNGLALCAIHHKAFDKGSIGLDENMRVLVSDAVNGGGIVERLFWDFDGKTITLPQVRKNYPFEGFVEWHRKEVFRG

SEQ ID NO: 1389 - DNA, 2043 bp, Escherichia coli
atgtatggaaaaatggaaaaagtttatgataccactagaattagtaatcttgctaacgacccgaaacagttttgttctttttgtgagtacataaaaagagatgatattagtatagatatcgccttggatgtgctgagaatatcttccatctattataatagattttcagttcagactgaagttgagtataacaatacattcaaaaaatgtattaatgagctagtaaactcatttcctgataacattgaactaatctctgagttcgagagtcaatgtaaaattatgcatgatataaataattctttctttgcggctacaaaatgtgctggtatttggcgtaaaaatacaaaaaaatcacatgcattaatacttaatctcatcatgttttgtgagatgtttttatcatcattatcatccttggttgtggtcaatgatcctaaaaaaatgaagaggatttttccattatttatcgtttctgaaaatattaatattcatgctgaacctgatatcgaatgttttcgagttatcgatagggcatttgatgaggtagccaattacaccggaagaatattttcttatttacggactcatgggccattgaaactaacttcttgtgtgaataaacaaaccttgctttcaatgggagggtaccttaatgagtggaatgtttttgactcattaagcagagtaagagactttttcagactaagtagtgcagtatttacaaaattggataataacatttactctcttgaggttgatagtttttgtttataccgagattatgagattgcaagaaatagactaatgatgagagcgtcacatctatatagcgaagttcatgaatttagtaacaaacattttcatctaaatagttgggtaaaggatcatatgccatcttacttaaattctgatggcgtttttagctcatttcatctaagcgagttggaaaatatgtctcctgatgaccttcatgaagaatatgggaatatatcattatttaattgggtgcacgcttatcaatgtttagtcgagttatctaaagaagaaatgagcaaaagattttcatcgacaaaacctatacccctacagttggatcgctggctgatcataaaaagccgtgagagttggttatcattctttcaacgtaaggggattgcagcagatgcagcaaaaaaactgatagattattttaccttcaattcaaaatcacatgatcttaatgattgcccatttattccctgtatggacggtttatgcttaatgcctgcattaatagcaaatagctcagtgactcgctctctaatgtcattatttggttccaaaaaaatttctcaagcaagtaaagggcgatttcatgagcaacaatttataaaacgagttcgtgatgcggggattaaagcttctccaattgatgctcatgctaattatcagtgtgattgcgtgattctcctggatgattgtttgatttttacagaactaaaatcaaatggtcaaccaatatattatggtaagtactatcagcaagtgtgtaacatcgttggagatagctcattaatacatgatcataataataaatttatgcgttcttattttcaacaaataaatcgaatttctgaacattatcttaatcatcttgatgtgatcattaaagaattcgaactaccatcaacatggcaacccaaaggtgtgtataagcttattgttactacaactatgctcggtgggaaatatcatgtggatgatacatatgtagcggataaatatgcattatctagtttttttcaacgaatacctggagtgatatatcaaacaaatgaaaatggaaaaatggcgaaaaatatcattgatgggtttgagtgttgcgaaggggaaatcactatcgataagtttatagattatctttcctctttgcccagtattaatgctgtacgtaaaaatataaaaaaattaacttatagtgttcgatttaatgaaaaattagtccatcacccttattatgattcttgggcttttggtccatatattcgtaagggaaatgat

SEQ ID NO: 1390 - protein, 681 aa, Escherichia coli
MYGKMEKVYDTTRISNLANDPKQFCSFCEYIKRDDISIDIALDVLRISSIYYNRFSVQTEVEYNNTFKKCINELVNSFPDNIELISEFESQCKIMHDINNSFFAATKCAGIWRKNTKKSHALILNLIMFCEMFLSSLSSLVVVNDPKKMKRIFPLFIVSENINIHAEPDIECFRVIDRAFDEVANYTGRIFSYLRTHGPLKLTSCVNKQTLLSMGGYLNEWNVFDSLSRVRDFFRLSSAVFTKLDNNIYSLEVDSFCLYRDYEIARNRLMMRASHLYSEVHEFSNKHFHLNSWVKDHMPSYLNSDGVFSSFHLSELENMSPDDLHEEYGNISLFNWVHAYQCLVELSKEEMSKRFSSTKPIPLQLDRWLIIKSRESWLSFFQRKGIAADAAKKLIDYFTFNSKSHDLNDCPFIPCMDGLCLMPALIANSSVTRSLMSLFGSKKISQASKGRFHEQQFIKRVRDAGIKASPIDAHANYQCDCVILLDDCLIFTELKSNGQPIYYGKYYQQVCNIVGDSSLIHDHNNKFMRSYFQQINRISEHYLNHLDVIIKEFELPSTWQPKGVYKLIVTTTMLGGKYHVDDTYVADKYALSSFFQRIPGVIYQTNENGKMAKNIIDGFECCEGEITIDKFIDYLSSLPSINAVRKNIKKLTYSVRFNEKLVHHPYYDSWAFGPYIRKGND

SEQ ID NO: 1391 - DNA, 171 bp, Escherichia coli
atgttggggtttggcctgaagttgaaattggtactacggaacggtatgatcatatcgcatcaaaatatcaaggtagtgatgattttctacgcgccgatccagaaacgtggattttatcatcaccataagcaatggcagcgacaacaccatcaatttctatatcaaaggtgg

SEQ ID NO: 1392 - protein, 57 aa, Escherichia coli
MLGFGLKLKLVLRNGMIISHQNIKVVMIFYAPIQKRGFYHHHKQWQRQHHQFLYQRW

SEQ ID NO: 1393 - DNA, 150 bp, Escherichia coli
atgtcagataccacactctcccgcccggaggtggtcagcgggcatacggacgttatctattccacctcagtctgccacattctggctgtacgaaagagtacactgttgccaatcgacacaattatccggcatcaagtgagtgatatcagt

SEQ ID NO: 1394 - protein, 50 aa, Escherichia coli
MSDTTLSRPEVVSGHTDVIYSTSVCHILAVRKSTLLPIDTIIRHQVSDIS

SEQ ID NO: 1395 - DNA, 144 bp, Escherichia coli
atgcgcagacatcttgttgaagacaattttactgaccacctgagaacgctattctaccgaataatatttattatcttggtgaataatgatgattacctgtgtaactatggttttatgctgatgggaccggcagtacaatttctg

SEQ ID NO: 1396 - protein, 48 aa, Escherichia coli
MRRHLVEDNFTDHLRTLFYRIIFIILVNNDDYLCNYGFMLMGPAVQFL

SEQ ID NO: 1397 - DNA, 156 bp, Escherichia coli
atggtcccaagtttgctctggctggaagctgcatcgtccacattacgtgggcagggtggtttcgctatgctacttgaacgttttgaccatgtggctcaggtagctaatatcaaaagacgtcattttgtctccacgcccaccttggtgaacattcaa

SEQ ID NO: 1398 - protein, 52 aa, Escherichia coli
MVPSLLWLEAASSTLRGQGGFAMLLERFDHVAQVANIKRRHFVSTPTLVNIQ

SEQ ID NO: 1399 - DNA, 5819 bp, Escherichia coli
aagcagcattacttgacctttccctgcataacaatatttataaaataatacgttttatgatctcaccttgggctcccaacaagataatttcagttttaaagactttcacgaaaaaaatatagaaatacctcaccacccttcacttaccaattaatctcacaggaaatccaacttccttaccacaaatacaatcccaagtaacacctcccaaaatttttgatactttaggctgcaatggcattattgacattataaatttatcaagttcttcgctatatttaattccctttatatttcttattattgatattctagcagtaaagatagccgtctctccatctacactaaaagtgtaattacaattttttgtaatctcatcaaattcaaccgataacaaatcaatattatggtttgtaaacactatgcccattccatacctccttaaattcctgttcagtcatcagatatcgactcccttgatatggatcatatattatcacattcccagcatcatcaacacccttaacaagtacccaatgccctactttacttccagaatcccacatcattgctccccatgaaccagtattactgagggcatataaactagattcgctcactgcattcccttcccagccgacatcaaatttattaagcttgtttgccagcgacgtcatagatgttaattctgttccaattacattttgcgtgacaaaaatatacctatccctaagcaacatttccccacaggccgctccacagcctgttaaagtcaattgctttattacatttgaatctaaaacctcatcaaatactgtccaattgccaccagcaccaccttctaaaactactggctctacaaatactttcccagagatattttcttctggtatttttgcgggtatcataaagccccataaaaagctggcaaaatgctccagagcaatctgatcaccattatttgtatccattatcatttttttaagtgcatcccatgcttgcccatttatcaatgaattactaatattaaataaagcctgttctttttcatttaaatttatatttgcctgttcacataacccatcttcgcctatcgggcaagcaaccgttgccgttgccgtatctaacagagcatcgaatgtaactaaggctaaatccgccacaccatgtaaagtggtgattgctccattccccatttgagtaagtgtgttctctccaaaccattctctgatctgagatttatctccttcaataccattcctgagagattctctgatattctttattgaaaaaaactccccccatgattggtcaggatcttttatttgaaataaatcatttttaacctcaggtgaaatatctccgtcaaaaatattaccaacagagaggagatccttcagaagcagtaaatcgtgtattacttcagcagtcctttcataattaaaagttctatcaatgacagaaatcattggtgattttattttggtatacaatttaccaaggcagttgtggttattaatcccaacaactgaaccatgataagcaacaggtttcccttctattgttacagtcggacttcccgttaaaataacacagtcacccgttccttgagatgtaccggatatgacacctttaccggcattactttgagttccagcaatcactgaaccaacatttaaagctctgcatccacgcgcccataccgttgaactgtactgtctttcactatctaaagtctggtaactgtcaaaaggaaccttgtaacctcctacttcacatacatctggtgaagaacacacgactctaaatctacattcaccatccccgatatgatagttacccataatattttttccctatacattcaggaataatacaactcagcactccttctttcattccaaaaaaatcaggtattgttaatctccaggtaaggtatatttcctgtcgacttaaatcgataaccattgtatccgcaacaggtaagaacatatgtgatgtattatgcttggtttttaatataagtacaggtcgtatacctggcaattttgtcttaacaacctgttcaaatttaaaaaaaccttcaagagagatgttttcatcgccagagagaaaccccgtgtatatcatatccggatgagcactattgtagaaccgctcatcaaaatcatccggcaaatagggatagcgcttttcacgccatacttcattgtaggttcctgcatactggaggcgacttttccaccatcgagatacagggccaacaccttgaaaaaagtcagattccccattaaaaatggtagcgttttctgacaaagcagagctggttatttgtgggagtttatattgacaacttgtattaagttgagaaatatcaggataatatccacaacctacagggtttgctgaaaaaaccaatttctccataccatctggttgccaaataccaccgtaagcaagctcatagcgtagaggaacattaataattttatctggtaagctcatctgccaacgatttcgctcatattgtaagtagcggacaccagataaactcagttctttagaaaaactattaaccctcacacaagccttccactgagacttatcccctgaaggggcatgagcactacctgtcacgtgaatatttgtatttcttttacaaagaactaagtctgttcacgattttagcctacttgtttcagactccccatagtattcatcagacatggacaattctttttgaaactcagcaagatcagcataaaatccatttttaattcgcaatgacattttaatagcaataacatcaaacaaaagaccataacgaccatatttttcaaatgacaacaaaggaaatggcgtgttatttttcatttctatcatgcttattgattcctgaataagtcatgctatgattaatttaaacaatcacaaatggtgattcacaggcgtataaagcaaatacaatcaccatgttttatatcctgcactatccgttcagatgaatatcttttcctttaatatctacaggaccggtagcctcaaatagaaactccgtcccccgtattattatctttcctgttttctccagttttatggaacaagtcccgctctctccctgcccacaaattagctcaatactgtccccagatatgatatttgtaccatgctcaactttcagttcgtaattatcacctattttaatactctgttttttgacgacttcttcggtatcagttcccgtcaccttgcttgtctggttgttatttacaaccttgtgccggtcattttttatcgtgagatgctgatcgttcgctaccgtcactttctggtcatgaccaccttcctttttgctccccacattcaccgtctggcgccagccccaccgttatcttctggtcgttaccaatggtctccgtgtggtcagccttcacatccggcgtccgattattcagcacctccgtatccatgttcttctgcgcgtggatatagacctgttcaccgcccgtggcgtcttcaaaccgcagttcattaaagccgcttcctttataggtcttcgaccgtatcgtcatctgcgtcttcgtccccggcaggctccccggcgaacggttgtcctcatggtacgtccgccccatgattatcgggtggtccgggtccccgttcaggaagtcaacaatcacctcctggcccacgcgcggtatcgccaggttaccaaaccccggccccgcccacgcctgtgacaccctcacccagcacgaactcgcctccgttgccgggttatacctgtcccagtgaaacttcacccgtacccggccatgttcatcacagaagatttcctctcccgcaggcccggtgacaatggcgctctgtggcccgtccaccttcggtttgctttgcagccgtggacgccacgtccggtccgccggtatcacctctaactgatttcccagcgtggttcctctcccctggctgccgtgaagcgcctgcggctggtctcctgacagaatgctctgtaccacctgccattcacggttcagcatcttctgcggatgccccgtcagcgtaaaccacgtccccggccacagcttcggcgaattactctgccctgtggccttttccgcatcactgcgcaggctctccatccggtacagcgtgaaatccttgccgtgctgttcatccttgtaccttcccggataatcaaatatttcatactgttcaagctgtccgttcaggctctcaccctgctgctcatacatccccggccagtccggcaccttaaacgtgtaatcctggctctgcaccgatgacgggcggacatgcgcctcataacggaacatactgacacactccgtctccgctcctgccgatgtgtccgggttaaacggaagctcccccgcctgtgacagccccgccacatcgtcgcacagcgtcagcttctgctccggactgtccgccgcaaaccgctcaaagaagaaaatcccctcctccgcccacagccgcgccagaaacgccaggtcgctttccccgtactggacacagaattcccgcgccggatggtcctcataaaacagcggcgtccactccgtgacgccgttctcgttcagtaatgtggccgatatcgtccggatatcctgctgctggaagatacggaagttccgccgcagcccgcaccgccataacggcggctcaatacgcaggtgataacgcatctgccagccgttgttctcctgcataccaaaccctgccaccacgcctgtgacataacgcagcgggatgacaccctgccagatagtcagcgttgcgttcttctccagcagcatctccgccgtctgcataaaagaatcgctggcgacatccacactcatcacaaacggataagactggttctggattaaccggaagctcaccactgcaaaggtgtccggctcctggccgtcaacctccagcgtaaagcgaagaccttttaaggacataaatacctctcagacatatcagcctatatttaccgtgccgccaccaataaccacgccgccgcagtcaatagcatcaccggttctggcggcgggcaggccgtcaataaagacggttgacgagcctctggcgatttttcggggatgaggtggatgcttcggtttagcatgcggcgtcagcggatctccctgacgggctgcggggagaccatcgataaaaacggtggatgacccggcggtgatgacggtctcgtaataaccgtcgtgctgggtgcctttgtcggtaagtttggctgctaaaggcataattcctcctgttcagaatttctacagcagcaggtttcaaaaatccggagaaatattcaacgaaatattaatcacttcaccggatattctgatacgtaccttcactggtctatttaagtaatacaaattgttggcgtgtattaagtttcattttgttctccttaattatgtaaggagtatttgatcatgtataagcaatgaaaaacagtttcaggaaataaggagtatctcaatttttaaacataaaatgagaatcgtccagtacaaaaaagcagtgttacgtaatctttccctgattaaatacgctaccgcccagccctgataacatgatctgcactgcgctatcatatcgacatgtttctctacatgcgaaaagatgttttattttcagattatattaaattgatatttaatataaaaaccgaaatcacatcaaccatatgaatagttgtgccaacattaattgctattcatagcaaacaaatggacgtccagttaactacgccagtgattcattaacattaacctccggcattattgtta

SEQ ID NO: 1400 - DNA, 1638 bp, Escherichia coli
atgtccttaaaaggtcttcgctttacgctggaggttgacggccaggagccggacacctttgcagtggtgagcttccggttaatccagaaccagtcttatccgtttgtgatgagtgtggatgtcgccagcgattcttttatgcagacggcggagatgctgctggagaagaacgcaacgctgactatctggcagggtgtcatcccgctgcgttatgtcacaggcgtggtggcagggtttggtatgcaggagaacaacggctggcagatgcgttatcacctgcgtattgagccgccgttatggcggtgcgggctgcggcggaacttccgtatcttccagcagcaggatatccggacgatatcggccacattactgaacgagaacggcgtcacggagtggacgccgctgttttatgaggaccatccggcgcgggaattctgtgtccagtacggggaaagcgacctggcgtttctggcgcggctgtgggcggaggaggggattttcttctttgagcggtttgcggcggacagtccggagcagaagctgacgctgtgcgacgatgtggcggggctgtcacaggcgggggagcttccgtttaacccggacacatcggcaggagcggagacggagtgtgtcagtatgttccgttatgaggcgcatgtccgcccgtcatcggtgcagagccaggattacacgtttaaggtgccggactggccggggatgtatgagcagcagggtgagagcctgaacggacagcttgaacagtatgaaatatttgattatccgggaaggtacaaggatgaacagcacggcaaggatttcacgctgtaccggatggagagcctgcgcagtgatgcggaaaaggccacagggcagagtaattcgccgaagctgtggccggggacgtggtttacgctgacggggcatccgcagaagatgctgaaccgtgaatggcaggtggtacagagcattctgtcaggagaccagccgcaggcgcttcacggcagccaggggagaggaaccacgctgggaaatcagttagaggtgataccggcggaccggacgtggcgtccacggctgcaaagcaaaccgaaggtggacgggccacagagcgccattgtcaccgggcctgcgggagaggaaatcttctgtgatgaacatggccgggtacgggtgaagtttcactgggacaggtataacccggcaacggaggcgagttcgtgctgggtgagggtgtcacaggcgtgggcggggccggggtttggtaacctggcgataccgcgcgtgggccaggaggtgattgttgacttcctgaacggggacccggaccacccgataatcatggggcggacgtaccatgaggacaaccgttcgccggggagcctgccggggacgaagacgcagatgacgatacggtcgaagacctataaaggaagcggctttaatgaactgcggtttgaagacgccacgggcggtgaacaggtctatatccacgcgcagaagaacatggatacggaggtgctgaataatcggacgccggatgtgaaggctgaccacacggagaccattggtaacgaccagaagataacggtggggctggcgccagacggtgaatgtggggagcaaaaaggaaggtggtca

SEQ ID NO: 1401 - protein, 546 aa, Escherichia coli
MSLKGLRFTLEVDGQEPDTFAVVSFRLIQNQSYPFVMSVDVASDSFMQTAEMLLEKNATLTIWQGVIPLRYVTGVVAGFGMQENNGWQMRYHLRIEPPLWRCGLRRNFRIFQQQDIRTISATLLNENGVTEWTPLFYEDHPAREFCVQYGESDLAFLARLWAEEGIFFFERFAADSPEQKLTLCDDVAGLSQAGELPFNPDTSAGAETECVSMFRYEAHVRPSSVQSQDYTFKVPDWPGMYEQQGESLNGQLEQYEIFDYPGRYKDEQHGKDFTLYRMESLRSDAEKATGQSNSPKLWPGTWFTLTGHPQKMLNREWQVVQSILSGDQPQALHGSQGRGTTLGNQLEVIPADRTWRPRLQSKPKVDGPQSAIVTGPAGEEIFCDEHGRVRVKFHWDRYNPATEASSCWVRVSQAWAGPGFGNLAIPRVGQEVIVDFLNGDPDHPIIMGRTYHEDNRSPGSLPGTKTQMTIRSKTYKGSGFNELRFEDATGGEQVYIHAQKNMDTEVLNNRTPDVKADHTETIGNDQKITVGLAPDGECGEQKGRWS

SEQ ID NO: 1402 - DNA, 666 bp, Escherichia coli
atgagcttaccagataaaattattaatgttcctctacgctatgagcttgcttacggtggtatttggcaaccagatggtatggagaaattggttttttcagcaaaccctgtaggttgtggatattatcctgatatttctcaacttaatacaagttgtcaatataaactcccacaaataaccagctctgctttgtcagaaaacgctaccatttttaatggggaatctgacttttttcaaggtgttggccctgtatctcgatggtggaaaagtcgcctccagtatgcaggaacctacaatgaagtatggcgtgaaaagcgctatccctatttgccggatgattttgatgagcggttctacaatagtgctcatccggatatgatatacacggggtttctctctggcgatgaaaacatctctcttgaaggtttttttaaatttgaacaggttgttaagacaaaattgccaggtatacgacctgtacttatattaaaaaccaagcataatacatcacatatgttcttacctgttgcggatacaatggttatcgatttaagtcgacaggaaatataccttacctggagattaacaatacctgatttttttggaatgaaagaaggagtgctgagttgtattattcctgaatgtatagggaaaaaatattatggg

SEQ ID NO: 1403 - protein, 345 aa, Escherichia coli
MKNNTPFPLLSFEKYGRYGLLFDVIAIKMSLRIKNGFYADLAEFQKELSMSDEYYGESETSRLKSRTDLVLCKRNTNIHVTGSAHAPSGDKSQWKACVRVNSFSKELSLSGVRYLQYERNRWQMSLPDKIINVPLRYELAYGGIWQPDGMEKLVFSANPVGCGYYPDISQLNTSCQYKLPQITSSALSENATIFNGESDFFQGVGPVSRWWKSRLQYAGTYNEVWREKRYPYLPDDFDERFYNSAHPDMIYTGFLSGDENISLEGFFKFEQVVKTKLPGIRPVLILKTKHNTSHMFLPVADTMVIDLSRQEIYLTWRLTIPDFFGMKEGVLSCIIPECIGKKYYG

SEQ ID NO: 1404 - DNA, 282 bp, Escherichia coli
atgcctttagcagccaaacttaccgacaaaggcacccagcacgacggttattacgagaccgtcatcaccgccgggtcatccaccgtttttatcgatggtctccccgcagcccgtcagggagatccgctgacgccgcatgctaaaccgaagcatccacctcatccccgaaaaatcgccagaggctcgtcaaccgtctttattgacggcctgcccgccgccagaaccggtgatgctattgactgcggcggcgtggttattggtggcggcacggtaaatataggc

SEQ ID NO: 1405 - protein, 94 aa, Escherichia coli
MPLAAKLTDKGTQHDGYYETVITAGSSTVFIDGLPAARQGDPLTPHAKPKHPPHPRKIARGSSTVFIDGLPAARTGDAIDCGGVVIGGGTVNIG

SEQ ID NO: 1406 - DNA, 1437 bp, Escherichia coli
atgggtaactatcatatcggggatggtgaatgtagatttagagtcgtgtgttcttcaccagatgtatgtgaagtaggaggttacaaggttccttttgacagttaccagactttagatagtgaaagacagtacagttcaacggtatgggcgcgtggatgcagagctttaaatgttggttcagtgattgctggaactcaaagtaatgccggtaaaggtgtcatatccggtacatctcaaggaacgggtgactgtgttattttaacgggaagtccgactgtaacaatagaagggaaacctgttgcttatcatggttcagttgttgggattaataaccacaactgccttggtaaattgtataccaaaataaaatcaccaatgatttctgtcattgatagaacttttaattatgaaaggactgctgaagtaatacacgatttactgcttctgaaggatctcctctctgttggtaatatttttgacggagatatttcacctgaggttaaaaatgatttatttcaaataaaagatcctgaccaatcatggggggagtttttttcaataaagaatatcagagaatctctcaggaatggtattgaaggagataaatctcagatcagagaatggtttggagagaacacacttactcaaatggggaatggagcaatcaccactttacatggtgtggcggatttagccttagttacattcgatgctctgttagatacggcaacggcaacggttgcttgcccgataggcgaagatgggttatgtgaacaggcaaatataaatttaaatgaaaaagaacaggctttatttaatattagtaattcattgataaatgggcaagcatgggatgcacttaaaaaaatgataatggatacaaataatggtgatcagattgctctggagcattttgccagctttttatggggctttatgatacccgcaaaaataccagaagaaaatatctctgggaaagtatttgtagagccagtagttttagaaggtggtgctggtggcaattggacagtatttgatgaggttttagattcaaatgtaataaagcaattgactttaacaggctgtggagcggcctgtggggaaatgttgcttagggataggtatatttttgtcacgcaaaatgtaattggaacagaattaacatctatgacgtcgctggcaaacaagcttaataaatttgatgtcggctgggaagggaatgcagtgagcgaatctagtttatatgccctcagtaatactggttcatggggagcaatgatgtgggattctggaagtaaagtagggcattgggtacttgttaagggtgttgatgatgctgggaatgtgataatatatgatccatatcaagggagtcgatatctgatgactgaacaggaatttaaggaggtatggaatgggcatagtgtttacaaacca

SEQ ID NO: 1407 - protein, 479 aa, Escherichia coli
MGNYHIGDGECRFRVVCSSPDVCEVGGYKVPFDSYQTLDSERQYSSTVWARGCRALNVGSVIAGTQSNAGKGVISGTSQGTGDCVILTGSPTVTIEGKPVAYHGSVVGINNHNCLGKLYTKIKSPMISVIDRTFNYERTAEVIHDLLLLKDLLSVGNIFDGDISPEVKNDLFQIKDPDQSWGEFFSIKNIRESLRNGIEGDKSQIREWFGENTLTQMGNGAITTLHGVADLALVTFDALLDTATATVACPIGEDGLCEQANINLNEKEQALFNISNSLINGQAWDALKKMIMDTNNGDQIALEHFASFLWGFMIPAKIPEENISGKVFVEPVVLEGGAGGNWTVFDEVLDSNVIKQLTLTGCGAACGEMLLRDRYIFVTQNVIGTELTSMTSLANKLNKFDVGWEGNAVSESSLYALSNTGSWGAMMWDSGSKVGHWVLVKGVDDAGNVIIYDPYQGSRYLMTEQEFKEVWNGHSVYKP

SEQ ID NO: 1408 - DNA, 288 bp, Escherichia coli
atgggcatagtgtttacaaaccataatattgatttgttatcggttgaatttgatgagattacaaaaaattgtaattacacttttagtgtagatggagagacggctatctttactgctagaatatcaataataagaaatataaagggaattaaatatagcgaagaacttgataaatttataatgtcaataatgccattgcagcctaaagtatcaaaaattttgggaggtgttacttgggattgtatttgtggtaaggaagttggatttcctgtgagattaattggtaag

SEQ ID NO: 1409 - protein, 96 aa, Escherichia coli
MGIVFTNHNIDLLSVEFDEITKNCNYTFSVDGETAIFTARISIIRNIKGIKYSEELDKFIMSIMPLQPKVSKILGGVTWDCICGKEVGFPVRLIGK

SEQ ID NO: 1410 - DNA, 6066 bp, Escherichia coli
tccatgctgcgaaatcctgctgtaactggtcgcggtttatggccgtcagcagacgggcagcagcgggtggaatatagcgcagcggtgaatgcagcagagtaagcagcaggacgccgcctgtgcagttcgctgtgctgcatctgggctgaggccagcagccatgactccttgagccattcgatcagcatcggggagaagctgggatagccttcggcggaacgtccaccgggataactctccacggtcagcgcctggcgtaaatcctccgcactgatgcctgtgcgttcggcaatcacccttacgtcgttgcgcgggattgccagcatctgtaacagcacatgggcaacggtgatctcactggcctgctggctcatacactccgaggcagccatttccagcgcctgttttgcaaaggggttaagccgctttacgagcgtggctaaatcaatctggatcataagatgtccttatcggagtaatttattgagctgatgcagaatatcctgtgtctggctgtccagacgcagcagataaaacagataaaatacggtcagcacaacaagaccgccgcacagtacatgcttgatggtcagtcgtcggattaactgataacgcccaccctgtatgttgttcttctgatgaagtagcggaaatggcgcgtcaccgcgcagtttgtgcagggcatggtgcaggcgctggtagatccgctcaaattcatcctgttgctgaatggcaaccttgtagcgcccgcgaaagccgagcgaaaaacagaggtataaaaattccagcagatcctggtaacgtaccggctcccggatcaggcgttcgagcaggataaacactttctcgccgccccaggcttcgttatgaaaatgaaccagcagcgactgtttgatccattcgtttttgttggaccagccgttgcccagcgccgcttcatcaataaacgtgcagagaatgtaacggaacgaaacaatgacgcccggttcgtatccctgttcctggagtagttgctctacggcctggacatcggttactacctgggtaaacagatgttccggcatggcctgactgttcatagtggacagacgcatcaccatgccgagcaacggcgtggcggcgtcaatcattggattcaggctgttgccgcgaagggcgagacggtactggcgtcctggtgttccgctctccggctccacgggaaaaaccgacgcttcactcatatcgctcattcacttatccccttatagcccagagctggaggttcagatcggggaagctgccggagatatgcagcgccagtgcgcccgcttttatcacgtcctgccaggccggggtgcctttttccagttcgaagtaaacataaccttcgtggtatggcaactgacgtggcgcagcggtaagcgtgtgcagcggaatacccggcacctgcacgctgaccacgctgcggattttgtcggtagcggccactttcgactgctggatgaactggcgttgtacctggtcgtagggcatcctggcgcgcactgccagtaccagcttgcaggactgcaacaatgtgggatcgttgatggtggcgatccaggtcccctctgaaaagaacaacggcagattctgcgcacgcggcaccagtacggtattgagcgcgcgccgcagttccgggatcacggttctggtgaaggtcgcggtaagatcccggtgattatacggctccacggtgcagggcaggcgattaccttcggtaaaggtcatcagttctcccagcagccccaccagatcccggtagaaggcttccggatgcagcgtgtgcagttgggaacgatgcgtgaactgcatttgatagcggttaagcatctgcaacatcataaattcggccacatcggcgatcccgctctgttcaggcgaaccaatgcgcccggccaggtcagcggcgcgggtggcaagcagtccctgcacctcgccggagaatgccccgagcaacccgctgacacggacggcctgaatggtgggaataaaggtgttgtccagcaccagcgcgccggtggcatttttattgaggatacggcacagggggagagtcaccatcgcgctgagatcatctgcgccgctgactatcctggggatcaactgccccagaccgactggctgttcgtcgccttcgtcagtgtgaaaatcacggacgcgggtatgggtgaggcggtaacgctccgtaccctgaccggcgctgtgcaacccctggatttcattgatcacgtcgcttatcaccggcagcgccagataaatattgtggctctctttcgatgaaagggttcccggctggaaaggttccggcagcagatcctggtcgggaatgctgaatacggtgccgtcaggcatacagcccgccgcacggtcaatcatgattttgccctgggcaagcagttctgtattgatggagagttccgtaaaaccccagaaaaaatcacccagtgcatccagacgacgggtcagcaggtactcgcagtgacgctgctgttgctgaaaatgctgcggcagggcaaacagcccttcctgccagatcactttgtttttcattgttgccatcgtcagttttcctcttttttcatctcaatcgcactggcgcggatatgcaccagcaggcgatagtggtggccgatactttctaccgactcaatttgtttccattctgtggcctggtcgtctgaaaaataggcaatgacaccgatataaccggttttctcatccaacttgatcggcggcagtgtttttacggtatccggcaacaggttgaagtcctggtgatcgatatagtttttccccagcacgtcgggcagcgcggtggtggcaacctggtcgtagtcggcggcatggaattttgagtcgtcgctcagataaaccaactggacatccaccggcgcggcttcgccatccgccgtcaggttgctgtccggctcggtcagcagcgtgacggtcagctcggttgactgatccatcagctttccgacctgaatatccggattgcggatcacctggctgatttttttcgctgtttcacagccagttaatacgacgctcatcagaacgcaggccagaaacgctttgccgttcatgcttccggctcccgctgtttttcgcgcagcacccggtcatagacctgggcataaacttcattgaacagcatttcaaatccctgctgtcggctggaggccagctcatcgtaatagttgctgtacatctgccatgcccaggcgtcgtccattttctggcgcagttcatggctgcggcggtattgcgcaaagcggcgcatcaggttgcccggcgaaaaggcgtccagcatgacacgcaacgcttccacaatcgccgcccggttagcctcttcatgatgccggatgttgcgcaggctttcggcgatggccgcaggtgctgcgagatgtaccgggcttttaccctcggcgaacatgacgttcagcgcggtggcatagtccatatcaaggcgcaacgggttgtcttctagtggacgcaggtgtttatccgacaggctgttctgttgttgttgcagactcagcaatcccttaatggcggcctgcaacgcccgtccggcctcttcgagaaactcatccgcatcctgagaattgtgcagcgtcagcggacactccataccgcgcagcagcggggttacggccaggtggtactgcgccatggcagaaaattcatcgccgtcctcatgacgggcattgccgggcggcagatccataaacggcgtgttgatcccgtttgcacctgtcagatcggatgcgggggctacgggccgggaaacgcgtggggcgatcggatcatctgccaccatcaggctttccgtctggagtgcctggagcggatcgctggaaaaaccgtgcgccaccgtgggggcaagctgatgctggaacggcattcccggatacgccggttgtccctcggtggtcagcagggtgtccgccagactgtcgcggttcattacaatcgtttccggggtcgccatccgctcgtcataggtaacagctgcaccgtcatgcagaaacactttcagcgccagtgcgccgagctggatctcatccccctggcgcaggcggatgagcgcatcggaagaggccggggccagattaatcatcagtcccggcgtcaggcaccgcaggcaataggctccgtcgtgccggataacggtacaggcacgcgcagcaatgcttcccgcccggtcctgtacctgccagtgacattccggcgtatggccaatatcaccgccgttttcgctgaacaggcattttgcggcgcgtccgctttccagttcgttgccattcatcacctgtaaagtcagtgaggcctggcgggattgctgtttttcctcagccataagtggttccatagaattattccctgattcggattgtgatggcggggcggtactttcggctgaccaataaagctggttctgccgaggcgggagctggccggatcgctaaggcgcatccctttagcctgctgtggcgccaggcacagccgtaaatcccaggcaaactggtcgcgcagaataaaggaaaggaacatggtcagcggcaggtgattttcgccatcgggtaaaaatgagagataacgctcccgcgacaggccgccaatctgcaacaggaattttccgctgcgatccggcacccgtgcgccgagggtaaaattaacgccgagtatggagcgtcccggaatatgtccagccgtttttcctttcggattacgtacacccagccggttctggtgtgccggatcaatggcgactttacgcagttgccagcgttcaatggtgacatccggcaaatcaaaacagtgcgacaccagattacagataacctccggcgcgcggcctggtgttgccagaattccggcgtaggccagcattttgctgtggttaatggcaagcctgtcacgcacgctctgattacccagcccgaccagtgcgtacatgcgctgtgaaaaggtgtcagtaccgccgctacgaaagcagatgtagtagcggtatttgcgccaggcatgataggcaaactgtgtccagcggtggctgaatagatcgagaaattctttcaggccgtcttcgttctgtgcggactcctgcgccatctgatccagataatagcccggtagcggcgactggctgccggaaaaacccaggaaccgggtttgcagtacatactgtccgttctggctacgggaaagcgcactcaggtccgtacccggaaaactgatactggcgtcagagctgaaacgcacgatctcccgggcaggctcggtacgcagggaaatgtcctggcccggcgcgccatgccgacggtacagcgcctccatcagcacatagaaattgcagttgcgcacatccgccggtaacggcggttttgtcgctatatcagggcgtgctggcccattttctcctgccattcccaggactcctgactttccgtgttaatgattttcagacagtggtacgaattgatgctggcgtagagggcaaagaagtgcgagagcacggtacccagaagataaatttcaccttcgcagataaacggatcgggacgtatccacagcgtggtcgccagcccgcgaaccggtacgcctttaaacaacctgtcaacaggtttggtttcgagtttttctatggcatccagtttctggcgtgacagtctggcccgctgcggatggtgagcacctggcaggtcgaaggtccgcaggatctggatcagtgtctccctgtccagcagggagaggtagttcaggttcatcgcggaaatcagcgaccagtgcatgtcgccgtccgtgactggccagagcggcagtgtcgggcgcgtgacattacgaaatgaggccactgccggatttttgttgacggccacgcagatatcaccggtatgcagccgggcagggatcatacggttggtacagattaatgacgtggtgatcacgtcatcgttaaaccgtgagctgcccggaatgctaccgtctgcatggacaaaggcgatagagtgttcaagcccgtggtaagcagggacgttt

SEQ ID NO: 1411 - DNA, 645 bp, Escherichia coli
aacgtccctgcttaccacgggcttgaacactctatcgcctttgtccatgcagacggtagcattccgggcagctcacggtttaacgatgacgtgatcaccacgtcattaatctgtaccaaccgtatgatccctgcccggctgcataccggtgatatctgcgtggccgtcaacaaaaatccggcagtggcctcatttcgtaatgtcacgcgcccgacactgccgctctggccagtcacggacggcgacatgcactggtcgctgatttccgcgatgaacctgaactacctctccctgctggacagggagacactgatccagatcctgcggaccttcgacctgccaggtgctcaccatccgcagcgggccagactgtcacgccagaaactggatgccatagaaaaactcgaaaccaaacctgttgacaggttgtttaaaggcgtaccggttcgcgggctggcgaccacgctgtggatacgtcccgatccgtttatctgcgaaggtgaaatttatcttctgggtaccgtgctctcgcacttctttgccctctacgccagcatcaattcgtaccactgtctgaaaatcattaacacggaaagtcaggagtcctgggaatggcaggagaaaatgggccagcacgccctgata

SEQ ID NO: 1412 - protein, 215 aa, Escherichia coli
NVPAYHGLEHSIAFVHADGSIPGSSRFNDDVITTSLICTNRMIPARLHTGDICVAVNKNPAVASFRNVTRPTLPLWPVTDGDMHWSLISAMNLNYLSLLDRETLIQILRTFDLPGAHHPQRARLSRQKLDAIEKLETKPVDRLFKGVPVRGLATTLWIRPDPFICEGEIYLLGTVLSHFFALYASINSYHCLKIINTESQESWEWQEKMGQHALI

SEQ ID NO: 1413 - DNA, 1104 bp, Escherichia coli
atggcaggagaaaatgggccagcacgccctgatatagcgacaaaaccgccgttaccggcggatgtgcgcaactgcaatttctatgtgctgatggaggcgctgtaccgtcggcatggcgcgccgggccaggacatttccctgcgtaccgagcctgcccgggagatcgtgcgtttcagctctgacgccagtatcagttttccgggtacggacctgagtgcgctttcccgtagccagaacggacagtatgtactgcaaacccggttcctgggtttttccggcagccagtcgccgctaccgggctattatctggatcagatggcgcaggagtccgcacagaacgaagacggcctgaaagaatttctcgatctattcagccaccgctggacacagtttgcctatcatgcctggcgcaaataccgctactacatctgctttcgtagcggcggtactgacaccttttcacagcgcatgtacgcactggtcgggctgggtaatcagagcgtgcgtgacaggcttgccattaaccacagcaaaatgctggcctacgccggaattctggcaacaccaggccgcgcgccggaggttatctgtaatctggtgtcgcactgttttgatttgccggatgtcaccattgaacgctggcaactgcgtaaagtcgccattgatccggcacaccagaaccggctgggtgtacgtaatccgaaaggaaaaacggctggacatattccgggacgctccatactcggcgttaattttaccctcggcgcacgggtgccggatcgcagcggaaaattcctgttgcagattggcggcctgtcgcgggagcgttatctctcatttttacccgatggcgaaaatcacctgccgctgaccatgttcctttcctttattctgcgcgaccagtttgcctgggatttacggctgtgcctggcgccacagcaggctaaagggatgcgccttagcgatccggccagctcccgcctcggcagaaccagctttattggtcagccgaaagtaccgccccgccatcacaatccgaatcagggaataattctatggaaccacttatggctgaggaaaaacagcaatcccgccaggcctcac

SEQ ID NO: 1414 - protein, 368 aa, Escherichia coli
MAGENGPARPDIATKPPLPADVRNCNFYVLMEALYRRHGAPGQDISLRTEPAREIVRFSSDASISFPGTDLSALSRSQNGQYVLQTRFLGFSGSQSPLPGYYLDQMAQESAQNEDGLKEFLDLFSHRWTQFAYHAWRKYRYYICFRSGGTDTFSQRMYALVGLGNQSVRDRLAINHSKMLAYAGILATPGRAPEVICNLVSHCFDLPDVTIERWQLRKVAIDPAHQNRLGVRNPKGKTAGHIPGRSILGVNFTLGARVPDRSGKFLLQIGGLSRERYLSFLPDGENHLPLTMFLSFILRDQFAWDLRLCLAPQQAKGMRLSDPASSRLGRTSFIGQPKVPPRHHNPNQGIILWNHLWLRKNSNPARPH

SEQ ID NO: 1415 - DNA, 1290 bp, Escherichia coli
atggaaccacttatggctgaggaaaaacagcaatcccgccaggcctcactgactttacaggtgatgaatggcaacgaactggaaagcggacgcgccgcaaaatgcctgttcagcgaaaacggcggtgatattggccatacgccggaatgtcactggcaggtacaggaccgggcgggaagcattgctgcgcgtgcctgtaccgttatccggcacgacggagcctattgcctgcggtgcctgacgccgggactgatgattaatctggccccggcctcttccgatgcgctcatccgcctgcgccagggggatgagatccagctcggcgcactggcgctgaaagtgtttctgcatgacggtgcagctgttacctatgacgagcggatggcgaccccggaaacgattgtaatgaaccgcgacagtctggcggacaccctgctgaccaccgagggacaaccggcgtatccgggaatgccgttccagcatcagcttgcccccacggtggcgcacggtttttccagcgatccgctccaggcactccagacggaaagcctgatggtggcagatgatccgatcgccccacgcgtttcccggcccgtagcccccgcatccgatctgacaggtgcaaacgggatcaacacgccgtttatggatctgccgcccggcaatgcccgtcatgaggacggcgatgaattttctgccatggcgcagtaccacctggccgtaaccccgctgctgcgcggtatggagtgtccgctgacgctgcacaattctcaggatgcggatgagtttctcgaagaggccggacgggcgttgcaggccgccattaagggattgctgagtctgcaacaacaacagaacagcctgtcggataaacacctgcgtccactagaagacaacccgttgcgccttgatatggactatgccaccgcgctgaacgtcatgttcgccgagggtaaaagcccggtacatctcgcagcacctgcggccatcgccgaaagcctgcgcaacatccggcatcatgaagaggctaaccgggcggcgattgtggaagcgttgcgtgtcatgctggacgccttttcgccgggcaacctgatgcgccgctttgcgcaataccgccgcagccatgaactgcgccagaaaatggacgacgcctgggcatggcagatgtacagcaactattacgatgagctggcctccagccgacagcagggatttgaaatgctgttcaatgaagtttatgcccaggtctatgaccgggtgctgcgcgaaaaacagcgggagccggaagca

SEQ ID NO: 1416 - protein, 430 aa, Escherichia coli
MEPLMAEEKQQSRQASLTLQVMNGNELESGRAAKCLFSENGGDIGHTPECHWQVQDRAGSIAARACTVIRHDGAYCLRCLTPGLMINLAPASSDALIRLRQGDEIQLGALALKVFLHDGAAVTYDERMATPETIVMNRDSLADTLLTTEGQPAYPGMPFQHQLAPTVAHGFSSDPLQALQTESLMVADDPIAPRVSRPVAPASDLTGANGINTPFMDLPPGNARHEDGDEFSAMAQYHLAVTPLLRGMECPLTLHNSQDADEFLEEAGRALQAAIKGLLSLQQQQNSLSDKHLRPLEDNPLRLDMDYATALNVMFAEGKSPVHLAAPAAIAESLRNIRHHEEANRAAIVEALRVMLDAFSPGNLMRRFAQYRRSHELRQKMDDAWAWQMYSNYYDELASSRQQGFEMLFNEVYAQVYDRVLREKQREPEA

SEQ ID NO: 1417 - DNA, 522 bp, Escherichia coli
atgaacggcaaagcgtttctggcctgcgttctgatgagcgtcgtattaactggctgtgaaacagcgaaaaaaatcagccaggtgatccgcaatccggatattcaggtcggaaagctgatggatcagtcaaccgagctgaccgtcacgctgctgaccgagccggacagcaacctgacggcggatggcgaagccgcgccggtggatgtccagttggtttatctgagcgacgactcaaaattccatgccgccgactacgaccaggttgccaccaccgcgctgcccgacgtgctggggaaaaactatatcgatcaccaggacttcaacctgttgccggataccgtaaaaacactgccgccgatcaagttggatgagaaaaccggttatatcggtgtcattgcctatttttcagacgaccaggccacagaatggaaacaaattgagtcggtagaaagtatcggccaccactatcgcctgctggtgcatatccgcgccagtgcgattgagatgaaaaaagaggaaaac

SEQ ID NO: 1418 - protein, 174 aa, Escherichia coli
MNGKAFLACVLMSVVLTGCETAKKISQVIRNPDIQVGKLMDQSTELTVTLLTEPDSNLTADGEAAPVDVQLVYLSDDSKFHAADYDQVATTALPDVLGKNYIDHQDFNLLPDTVKTLPPIKLDEKTGYIGVIAYFSDDQATEWKQIESVESIGHHYRLLVHIRASAIEMKKEEN

SEQ ID NO: 1419 - DNA, 1344 bp, Escherichia coli
atggcaacaatgaaaaacaaagtgatctggcaggaagggctgtttgccctgccgcagcattttcagcaacagcagcgtcactgcgagtacctgctgacccgtcgtctggatgcactgggtgattttttctggggttttacggaactctccatcaatacagaactgcttgcccagggcaaaatcatgattgaccgtgcggcgggctgtatgcctgacggcaccgtattcagcattcccgaccaggatctgctgccggaacctttccagccgggaaccctttcatcgaaagagagccacaatatttatctggcgctgccggtgataagcgacgtgatcaatgaaatccaggggttgcacagcgccggtcagggtacggagcgttaccgcctcacccatacccgcgtccgtgattttcacactgacgaaggcgacgaacagccagtcggtctggggcagttgatccccaggatagtcagcggcgcagatgatctcagcgcgatggtgactctccccctgtgccgtatcctcaataaaaatgccaccggcgcgctggtgctggacaacacctttattcccaccattcaggccgtccgtgtcagcgggttgctcggggcattctccggcgaggtgcagggactgcttgccacccgcgccgctgacctggccgggcgcattggttcgcctgaacagagcgggatcgccgatgtggccgaatttatgatgttgcagatgcttaaccgctatcaaatgcagttcacgcatcgttcccaactgcacacgctgcatccggaagccttctaccgggatctggtggggctgctgggagaactgatgacctttaccgaaggtaatcgcctgccctgcaccgtggagccgtataatcaccgggatcttaccgcgaccttcaccagaaccgtgatcccggaactgcggcgcgcgctcaataccgtactggtgccgcgtgcgcagaatctgccgttgttcttttcagaggggacctggatcgccaccatcaacgatcccacattgttgcagtcctgcaagctggtactggcagtgcgcgccaggatgccctacgaccaggtacaacgccagttcatccagcagtcgaaagtggccgctaccgacaaaatccgcagcgtggtcagcgtgcaggtgccgggtattccgctgcacacgcttaccgctgcgccacgtcagttgccataccacgaaggttatgtttacttcgaactggaaaaaggcaccccggcctggcaggacgtgataaaagcgggcgcactggcgctgcatatctccggcagcttccccgatctgaacctccagctctgggctataagggga

SEQ ID NO: 1420 - protein, 448 aa, Escherichia coli
MATMKNKVIWQEGLFALPQHFQQQQRHCEYLLTRRLDALGDFFWGFTELSINTELLAQGKIMIDRAAGCMPDGTVFSIPDQDLLPEPFQPGTLSSKESHNIYLALPVISDVINEIQGLHSAGQGTERYRLTHTRVRDFHTDEGDEQPVGLGQLIPRIVSGADDLSAMVTLPLCRILNKNATGALVLDNTFIPTIQAVRVSGLLGAFSGEVQGLLATRAADLAGRIGSPEQSGIADVAEFMMLQMLNRYQMQFTHRSQLHTLHPEAFYRDLVGLLGELMTFTEGNRLPCTVEPYNHRDLTATFTRTVIPELRRALNTVLVPRAQNLPLFFSEGTWIATINDPTLLQSCKLVLAVRARMPYDQVQRQFIQQSKVAATDKIRSVVSVQVPGIPLHTLTAAPRQLPYHEGYVYFELEKGTPAWQDVIKAGALALHISGSFPDLNLQLWAIRG

SEQ ID NO: 1421 - DNA, 762 bp, Escherichia coli
atgagcgatatgagtgaagcgtcggtttttcccgtggagccggagagcggaacaccaggacgccagtaccgtctcgcccttcgcggcaacagcctgaatccaatgattgacgccgccacgccgttgctcggcatggtgatgcgtctgtccactatgaacagtcaggccatgccggaacatctgtttacccaggtagtaaccgatgtccaggccgtagagcaactactccaggaacagggatacgaaccgggcgtcattgtttcgttccgttacattctctgcacgtttattgatgaagcggcgctgggcaacggctggtccaacaaaaacgaatggatcaaacagtcgctgctggttcattttcataacgaagcctggggcggcgagaaagtgtttatcctgctcgaacgcctgatccgggagccggtacgttaccaggatctgctggaatttttatacctctgtttttcgctcggctttcgcgggcgctacaaggttgccattcagcaacaggatgaatttgagcggatctaccagcgcctgcaccatgccctgcacaaactgcgcggtgacgcgccatttccgctacttcatcagaagaacaacatacagggtgggcgttatcagttaatccgacgactgaccatcaagcatgtactgtgcggcggtcttgttgtgctgaccgtattttatctgttttatctgctgcgtctggacagccagacacaggatattctgcatcagctcaataaattactccga

SEQ ID NO: 1422 - protein, 254 aa, Escherichia coli
MSDMSEASVFPVEPESGTPGRQYRLALRGNSLNPMIDAATPLLGMVMRLSTMNSQAMPEHLFTQVVTDVQAVEQLLQEQGYEPGVIVSFRYILCTFIDEAALGNGWSNKNEWIKQSLLVHFHNEAWGGEKVFILLERLIREPVRYQDLLEFLYLCFSLGFRGRYKVAIQQQDEFERIYQRLHHALHKLRGDAPFPLLHQKNNIQGGRYQLIRRLTIKHVLCGGLVVLTVFYLFYLLRLDSQTQDILHQLNKLLR

SEQ ID NO: 1423 - DNA, 458 bp, Escherichia coli
atgatccagattgatttagccacgctcgtaaagcggcttaacccctttgcaaaacaggcgctggaaatggctgcctcggagtgtatgagccagcaggccagtgagatcaccgttgcccatgtgctgttacagatgctggcaatcccgcgcaacgacgtaagggtgattgccgaacgcacaggcatcagtgcggaggatttacgccaggcgctgaccgtggagagttatcccggtggacgttccgccgaaggctatcccagcttctccccgatgctgatcgaatggctcaaggagtcatggctgctggcctcagcccagatgcagcacagcgaactgcacaggcggcgtcctgctgcttactctgctgcattcaccgctgcgctatattccacccgctgctgcccgtctgctgacggccataaaccgcgaccagttacagcaggatttcgcagcatgga

SEQ ID NO: 1424 - protein, 152 aa, Escherichia coli
MIQIDLATLVKRLNPFAKQALEMAASECMSQQASEITVAHVLLQMLAIPRNDVRVIAERTGISAEDLRQALTVESYPGGRSAEGYPSFSPMLIEWLKESWLLASAQMQHSELHRRRPAAYSAAFTAALYSTRCCPSADGHKPRPVTAGFRSM

SEQ ID NO: 1425 - DNA, 7890 bp, Escherichia coli
gcagattttccaggacggtgatggtgggaatgtacgcataccgttcactgcgggaggtgtgccggtcttctccaaaaatactcgggacgtggtacatcagttcttcgcgtgtcagtgggcgctcccgacggatctgatttacatgaccaaaacgactggctaattgcatactttgctccttatgaatgaattagcggtataaacgaaaaggccgcgtctcccggagaagacgcggcctgatggatgaaatgaagacgtttattgcctgagaattccctcactggcgagatacgaatttagctgttttccggcatcaggttcaaaattccagcaccgccagcgtagctgccctccggcattgcggataaccagccggaaatgcgttccctggtcatcttcaataagcacattgcggtaagctgttgtgacggcaaccgcctgttcgcgtgagaaagggccttcgggcaataaaacagggtgacagtccgacataccggctattttccgataaattcaacgctggcgccggtggcattaccgtcagcaccaaccgtgacggtcactttgtcgtacgcacggtcttcaggattgaatacttcaaactcaaccttattgccttttacttcgtaagagccaaaatcagcggtttctgttgtttcctcgtcatattcccgggcgtatgcctgccgggcagcctgcaggacggaatctttattaatagtggtcgtctgtttcggggaaaaaccggcaagtgatgtgacaaatttcggacagaccttcagcatatcaccgcgggtgaattccattcgtacaccaaatgcctgtaaaacggacacatcacgctctgctatggagtgaacggcttttttgaccatttccggcgcctgtccgatttccacctcaacagccctgaatcccgtctgctgattacacatttgtgatgtggggatcaggttaccgttaatactgatacggctgcccaggagcgtctgtacaccattcgggcatccctgcatcaggccggtaataccaatcgtgccatttttcagcattaccagcgcctgaccatcttccgtcatggtctgacaccagccgtttttgacagcccagttgccggcggaggcggagaatgatgccacagtgaacagcaggggaaaaagagctctggtattcatgactgacctctgaaatgaacgtacggtgttattgataatgatggaaggtatgcagtgactgttcagggaatgacgtagccgtatatttagttttctgttcaacatattgtctccatacctgtcgggacggctttggcaggccggcgatcacaggttaaaggtgttgataagtttatggatgaaagagaaatgtggcagggcggagataaaacgctcttcagcgaccagactgtggatgtggcctctccgttcaaaccgttctgatgtcaggctgactgatttgatatctgccagaggaaagacctgcagttttcccttctgtaatgcgatcagataccagctaccgctgtaataaatgagccggcagggctccagtgacggataccatcgctcagtcatcagagagatgtggatacactgtcttattgccaggatgagttgcgagaaacactcggggaacgttgcagtgatatccggcgccggtagccagataaggcagggagagggctcctggttgtcggtaagacaggttatcagtcgtccgttccggagcggaagtatccgtgcgatcccggtattctgtataaaagaaagcatttcagggatcgcacccgggctgctctgtcgtctgaggctgtacctgccatttctgtactctaaatccaggtgaaccagacgctgatgaaaatcgcgctgtaaagtacgttctgtaacgccaaattcatctgacagtgtttttagtgacagagattctccggccatcagtcggctgataatgagtgataagcgaaccgccaggcgatcatgccgggaacgattatcagacatagatgtgcactccgtaagaaaacatcttttatttcatgatgttattatgcatcatgatgttgaaaggatgtgtcgcatccggataatcaggaataaaatgcagcagaaaaaatattcttttaattatctgatttttaagcaggatttcataaaaagaagaatgctcgttaatccagcgacacatcctgtcggcgtgagtgtgtcagaacagacgctcccacagtgtgatcagcaggtggataatgcggtcccgggctttacgcagaagctgtaacatccaggccggaaaactgaaccgggcaacggcgtcgtcaaaacttttcccgatggcatcaccaaaagtctgttgtgcgtgtttccgggcctgttcagagcggttttccccccggatatgtgaataaactgcgctggttgcctgtggtggcagcgcgtggatcatcagtgacaccagcgctggaaggttccagcctgcaggcgcggctacagggagtaccggaaatgatgaagggaacagggtggccacccgggctgttactgtcgccagtgagagttcctggtgacgggacgggcatttttctgtggcattccattcttcagcaggaaacatgcgatcggcatggctgagaacaaacaaaaagcgcgagggatctgcgccctcattcagtaaaaactgatgcatggcaatatcggcagcatacgcacgttcatcactccgcaggatccagataatcagatccagttccggcagtaactgacgataaagcgcctggtattcctgatcatgctgcggtgtttcaccaatgccgggcagatcgaccagcgtcattctgcgttcaccgagctgcagggtaagacgatgagcctggcgggtgcagccgttcaggggatgcgtggcgcagatacgggactgaaaaatggcattacacaggctgcttttgccggtgccggatttacccataatgccaatcacgggctcgtaatgaataacaccgtggagatgttcaaggattttctggcgaatttcttcaggaagaaacgtcagatatgatttcacttgtgcggagagggaaaaatggctgaatgacataccgttatcctgttgatttcgctgaaccggatcacactaatccggtttatcattcaggtaatatgggtgtgaaaaattttccattgacgggaagaagagtatggctaaaaacaaaggtatctgtcggaataaaaaatgcagtaatcctgtttcagaatttgatgaggcaaatgccttaaggttatgcgatgatcattataagctatggaagcgaaataaagagaatcgtcgggtcaggaatatttgtcgtataattagtagatatgacaaaagtctggactgggagatattttatagagtaagagatgctgcaaaaaataaaacgggaaagagaattattgaggacacaaaaatattacatcaatggcgtgcttcaaagcaagtaagaaaaagttctcacaagggtgtgcttcggtcacgggaatggcttaatacacaggagttactgagcagaaaacatatatctgttacaggtgaactatttaaattttacataaaagatattatcagattatattgctataagtttctctacagcagagaatatcttaatgaaaacgcatacaaaaaacgatatcagagagatattcaccccagaaaagttaatgttccgatactgcaacttgaagttgcatggataaataataattgccgctcaagtgattcaagcactgatattattatccttccgaggatgataagaagaatggttgtatttaattatacgaagataaataaacaattagagaaagtgttgggggggatagcacgaaaacaaacctcagaaaggaataaaggcggtctctataccagaataaaaaaagaaagtgactttctttctatggatagatttatggtggaaatagaaaatatcataagacctgaaaggtttccgacatcaatttatccagtcttttcacattcatttattgaacgagagcttccgctactgaatcttgcccgatcacagtatagaagagcaataagtaaaagagtggcgaattcaattttttatactttgcaaaaaactaacgtggcattatggctatatcttgaaatgtttgctctggtggcattcattaaactgtatacaggaaaaggttttgaattcataaagaacatgtgtgtatttatcgattatgagaaagggataataaaatccacacatgaagaactgctgggtgaaattaagcgtaacattcaagtgaatttgaaggtgaatcctgataattttccagagttaatagacatatacaattcatgctttagtgaaaatatattgtcatatgatattcaggatggtgattttaaatggcgctcatgatgtaaaaatattaatttcacattacatattaattatccacaaaaaacatataattaatttcaatgatttacatgtaaaaaatgctgatgattagccagcttagtatggttatgcaatgtgatgcttaacgcttacagataataacatattcatatgagttatatatcataatattcaataatcatgatatgctaatctgattatggataaaaattactgaatgacgtcatattatgattggcagtgtttcctgtatacgatgacttatctctcccgcatcatatgggggcacgtttcttaggaaaagtgacggggttacagaagccaattacgatagtttgttgtagagttatcacgagtttttgttgttctgaagacggaatcagaaaaataattccagagtaaacctgtctgttttttgaccagtaaagatccatgctggccgtgaaaaactgaaatcaacactcagtctgcatggatgtctgaagatgttgagaatgtcgggaatggtactatatacgtattttactaagtgttttactaaacatacacgtattttcataaacacttctaaaagtgttttcattaaacattacaatacacattgctttgtctgatacacatccagtttggtaaaattgttactcctgtgtttacgaaaattaaaatcagtttaatgctgccacaaaacaatctttcctgtttaagcaatcaagatggcattctattttgctgaagttacgtttaaccttttctgagttttcgtgttttagatcgttaatctgaaacaagtgtctttatgtaaaaacgcaaatccgattgaggtggcctggcgtgatttactgtgtgcttacgacgatttggttaaatggttttatggatgtttttgtaacgatgagattgatgagatgattaactggccctggtattttttatcagcgcaaggtaattctcttcatcatgagactcttttcagaaaaaacgtgatgattggttctggtgttttgattcagatgaggtttacgttatcgatggttaatcgtttttatggcgcggagtgaaacgtaacgttttcaggataagaacatcgattctgatattggtggtttttgttcttgtggcgggatatctgtaaccaggttttaagcgtgccatttcgcatttgtgattgagttatatggttaagctgtaggttttggtgttgttgttgatttacagcgccagaaagcgttctgattgcgtttttgatgttttgtttgcacgttctgttgatccgtttcccttcaggctttgtagtttttaaaaaccatttatgccgttgttgtgtgttttatcctgcatgtaggtttatcttttcttcgtgggggattcattctgttttaatcaggagccattggcgttgctcaatggcgggatgccgtaaagttttaccgcagtgattaatgatgtgaagtcaatccaaatcaacggagatctctcatcatgaatcaaccaatacacaatgcttactggttaacccgttttgacagcattctcgacagtgccctggcgcaacaccgtgccatctcgttaatccgggtggatttacgtttccctgagtatatgcctgccaccattatggataccgatttagattcagcggtgatttctcgttttttcgaatccctgaaagcaaaaattcaggcttaccagcggaaaaaacgacgagccaacaagcgtgtgcgtgcaaccactctgcattatttctggtgtcgggagtttggcaaggaaaaaggcaggaaacattatcacgtgatattactgctcaacaaagatacctggtgctcgccaggggatttcaccgttccttcttcgctggcgacactgatcaagctggcatggtgtagtgctctgcatcttgagccctggcagggtaatggactggttcatttttccaggcggacgcctttccgtaaaccgacatcatctgatgctcgcccttcttccgatgatacgcctttgtcgggtggatgttctgaaaccaggaaggcttcagacaaaaagccgggtggatccgctgtgctctgggtcaagcgtggtgatgtggaagcgatgcagaaagcccggaacagagccagttatctcgtgaaatatgagacgaagcagcatgacggttccgggcaacgtaattatggttgcagtcgtgggctggggcgtctactggatggcaggtgaaccctgtaaaacagcatccgatgcctgagtttatgccaacgcccttagctcgctttctgaaaagtcgtcctgaagtaatgcaatggattgccatctacttccgttcgtgacacataagtcgaaaaacctttggttgttctggttatttgcatttactgccattcatagaaatgaacagatcgattggtaggactcaaatgttatagcgtctctcttctcatagtctgctttgtaccagacgcggaatcccctaatgctggtgtacaggttctgactcatttcctcccccactttcatcccgttatactgtgaaaaaaggaggtaggcgtgaaacttaaaatgcaggatttgaggctgtttaatattgtgttcgagagcgatcctggctggatactggatttctctaaccgcaccttgtctgcttttttcgatgaagaattgaacattgatattgatgatgaacgttatcagaaagaggggacgtcaaaagccaaacgagttagatgcttgctgaaacaggttgatcgtgagaccgctctgcgggttcttggtgcgctctggcagtataaaacggaatccatgcctgaacaggctgaacaaagccgtaatgactatcttgcactgatttcccgcttagaaaacgctgacaccgatgaagccaaaggcgttaagcctgtccaggcatggcatggtgttgactggcattcacttatcgctgaaatgaacgagatgaaatctctgccgccacatccacgtggttttcggtttgaagcctggcttgctgaactgttcagtatctttaagcttgctcctcgttcgtctttccgaaatacaggcgaacagattgacggaagtttccgactgaatgatgaattttacctgatggaggcaaagtggcatcagaaaagaacgtcggctgccgacctccatgtatttgaaggaaagctcagtaccaaggcaacctggacacgcggtgtttttatcagttggatggggtttacgcctgaaggcctgacggcttttggtaaagggaagcgggttatctgtgtcagtggttatgatctttaccactcactgaatcataggatccctttacccgaccttctggatgctaaaacccggcacgcggctgaaacgggagagccctatgctgagttcggccgactatatgcactgaaagacaaacagttcggcacgctgaaataacgggttgggaagcgatgacctgctccccgttgtttcacacagaatcgtgtacaggg

SEQ ID NO: 1426 - DNA, 168 bp, Escherichia coli
atgcaattagccagtcgttttggtcatgtaaatcagatccgtcgggagcgcccactgacacgcgaagaactgatgtaccacgtcccgagtatttttggagaagaccggcacacctcccgcagtgaacggtatgcgtacattcccaccatcaccgtcctggaaaatctg

SEQ ID NO: 1427 - protein, 56 aa, Escherichia coli
MQLASRFGHVNQIRRERPLTREELMYHVPSIFGEDRHTSRSERYAYIPTITVLENL

SEQ ID NO: 1428 - DNA, 231 bp, Escherichia coli
atgtcggactgtcaccctgttttattgcccgaaggccctttctcacgcgaacaggcggttgccgtcacaacagcttaccgcaatgtgcttattgaagatgaccagggaacgcatttccggctggttatccgcaatgccggagggcagctacgctggcggtgctggaattttgaacctgatgccggaaaacagctaaattcgtatctcgccagtgagggaattctcaggcaa

SEQ ID NO: 1429 - protein, 77 aa, Escherichia coli
MSDCHPVLLPEGPFSREQAVAVTTAYRNVLIEDDQGTHFRLVIRNAGGQLRWRCWNFEPDAGKQLNSYLASEGILRQ

SEQ ID NO: 1430 - DNA, 780 bp, Escherichia coli
atgttgaacagaaaactaaatatacggctacgtcattccctgaacagtcactgcataccttccatcattatcaataacaccgtacgttcatttcagaggtcagtcatgaataccagagctctttttcccctgctgttcactgtggcatcattctccgcctccgccggcaactgggctgtcaaaaacggctggtgtcagaccatgacggaagatggtcaggcgctggtaatgctgaaaaatggcacgattggtattaccggcctgatgcagggatgcccgaatggtgtacagacgctcctgggcagccgtatcagtattaacggtaacctgatccccacatcacaaatgtgtaatcagcagacgggattcagggctgttgaggtggaaatcggacaggcgccggaaatggtcaaaaaagccgttcactccatagcagagcgtgatgtgtccgttttacaggcatttggtgtacgaatggaattcacccgcggtgatatgctgaaggtctgtccgaaatttgtcacatcacttgccggtttttccccgaaacagacgaccactattaataaagattccgtcctgcaggctgcccggcaggcatacgcccgggaatatgacgaggaaacaacagaaaccgctgattttggctcttacgaagtaaaaggcaataaggttgagtttgaagtattcaatcctgaagaccgtgcgtacgacaaagtgaccgtcacggttggtgctgacggtaatgccaccggcgccagcgttgaatttatcggaaaa

SEQ ID NO: 1431 - protein, 260 aa, Escherichia coli; identical to SEQ ID NO: 758

SEQ ID NO: 1432 - DNA, 678 bp, Escherichia coli
atgtctgataatcgttcccggcatgatcgcctggcggttcgcttatcactcattatcagccgactgatggccggagaatctctgtcactaaaaacactgtcagatgaatttggcgttacagaacgtactttacagcgcgattttcatcagcgtctggttcacctggatttagagtacagaaatggcaggtacagcctcagacgacagagcagcccgggtgcgatccctgaaatgctttcttttatacagaataccgggatcgcacggatacttccgctccggaacggacgactgataacctgtcttaccgacaaccaggagccctctccctgccttatctggctaccggcgccggatatcactgcaacgttccccgagtgtttctcgcaactcatcctggcaataagacagtgtatccacatctctctgatgactgagcgatggtatccgtcactggagccctgccggctcatttattacagcggtagctggtatctgatcgcattacagaagggaaaactgcaggtctttcctctggcagatatcaaatcagtcagcctgacatcagaacggtttgaacggagaggccacatccacagtctggtcgctgaagagcgttttatctccgccctgccacatttctctttcatccataaacttatcaacacctttaacctg

SEQ ID NO: 1433 - protein, 226 aa, Escherichia coli
MSDNRSRHDRLAVRLSLIISRLMAGESLSLKTLSDEFGVTERTLQRDFHQRLVHLDLEYRNGRYSLRRQSSPGAIPEMLSFIQNTGIARILPLRNGRLITCLTDNQEPSPCLIWLPAPDITATFPECFSQLILAIRQCIHISLMTERWYPSLEPCRLIYYSGSWYLIALQKGKLQVFPLADIKSVSLTSERFERRGHIHSLVAEERFISALPHFSFIHKLINTFNL

SEQ ID NO: 1434 - DNA, 882 bp, Escherichia coli
atgtcattcagccatttttccctctccgcacaagtgaaatcatatctgacgtttcttcctgaagaaattcgccagaaaatccttgaacatctccacggtgttattcattacgagcccgtgattggcattatgggtaaatccggcaccggcaaaagcagcctgtgtaatgccatttttcagtcccgtatctgcgccacgcatcccctgaacggctgcacccgccaggctcatcgtcttaccctgcagctcggtgaacgcagaatgacgctggtcgatctgcccggcattggtgaaacaccgcagcatgatcaggaataccaggcgctttatcgtcagttactgccggaactggatctgattatctggatcctgcggagtgatgaacgtgcgtatgctgccgatattgccatgcatcagtttttactgaatgagggcgcagatccctcgcgctttttgtttgttctcagccatgccgatcgcatgtttcctgctgaagaatggaatgccacagaaaaatgcccgtcccgtcaccaggaactctcactggcgacagtaacagcccgggtggccaccctgttcccttcatcatttccggtactccctgtagccgcgcctgcaggctggaaccttccagcgctggtgtcactgatgatccacgcgctgccaccacaggcaaccagcgcagtttattcacatatccggggggaaaaccgctctgaacaggcccggaaacacgcacaacagacttttggtgatgccatcgggaaaagttttgacgacgccgttgcccggttcagttttccggcctggatgttacagcttctgcgtaaagcccgggaccgcattatccacctgctgatcacactgtgggagcgtctgttc

SEQ ID NO: 1435 - protein, 294 aa, Escherichia coli
MSFSHFSLSAQVKSYLTFLPEEIRQKILEHLHGVIHYEPVIGIMGKSGTGKSSLCNAIFQSRICATHPLNGCTRQAHRLTLQLGERRMTLVDLPGIGETPQHDQEYQALYRQLLPELDLIIWILRSDERAYAADIAMHQFLLNEGADPSRFLFVLSHADRMFPAEEWNATEKCPSRHQELSLATVTARVATLFPSSFPVLPVAAPAGWNLPALVSLMIHALPPQATSAVYSHIRGENRSEQARKHAQQTFGDAIGKSFDDAVARFSFPAWMLQLLRKARDRIIHLLITLWERLF

SEQ ID NO: 1436 - DNA, 1221 bp, Escherichia coli
atggctaaaaacaaaggtatctgtcggaataaaaaatgcagtaatcctgtttcagaatttgatgaggcaaatgccttaaggttatgcgatgatcattataagctatggaagcgaaataaagagaatcgtcgggtcaggaatatttgtcgtataattagtagatatgacaaaagtctggactgggagatattttatagagtaagagatgctgcaaaaaataaaacgggaaagagaattattgaggacacaaaaatattacatcaatggcgtgcttcaaagcaagtaagaaaaagttctcacaagggtgtgcttcggtcacgggaatggcttaatacacaggagttactgagcagaaaacatatatctgttacaggtgaactatttaaattttacataaaagatattatcagattatattgctataagtttctctacagcagagaatatcttaatgaaaacgcatacaaaaaacgatatcagagagatattcaccccagaaaagttaatgttccgatactgcaacttgaagttgcatggataaataataattgccgctcaagtgattcaagcactgatattattatccttccgaggatgataagaagaatggttgtatttaattatacgaagataaataaacaattagagaaagtgttgggggggatagcacgaaaacaaacctcagaaaggaataaaggcggtctctataccagaataaaaaaagaaagtgactttctttctatggatagatttatggtggaaatagaaaatatcataagacctgaaaggtttccgacatcaatttatccagtcttttcacattcatttattgaacgagagcttccgctactgaatcttgcccgatcacagtatagaagagcaataagtaaaagagtggcgaattcaattttttatactttgcaaaaaactaacgtggcattatggctatatcttgaaatgtttgctctggtggcattcattaaactgtatacaggaaaaggttttgaattcataaagaacatgtgtgtatttatcgattatgagaaagggataataaaatccacacatgaagaactgctgggtgaaattaagcgtaacattcaagtgaatttgaaggtgaatcctgataattttccagagttaatagacatatacaattcatgctttagtgaaaatatattgtcatatgatattcaggatggtgattttaaatggcgctca

SEQ ID NO: 1437 - protein, 407 aa, Escherichia coli
MAKNKGICRNKKCSNPVSEFDEANALRLCDDHYKLWKRNKENRRVRNICRIISRYDKSLDWEIFYRVRDAAKNKTGKRIIEDTKILHQWRASKQVRKSSHKGVLRSREWLNTQELLSRKHISVTGELFKFYIKDIIRLYCYKFLYSREYLNENAYKKRYQRDIHPRKVNVPILQLEVAWINNNCRSSDSSTDIIILPRMIRRMVVFNYTKINKQLEKVLGGIARKQTSERNKGGLYTRIKKESDFLSMDRFMVEIENIIRPERFPTSIYPVFSHSFIERELPLLNLARSQYRRAISKRVANSIFYTLQKTNVALWLYLEMFALVAFIKLYTGKGFEFIKNMCVFIDYEKGIIKSTHEELLGEIKRNIQVNLKVNPDNFPELIDIYNSCFSENILSYDIQDGDFKWRS

SEQ ID NO: 1438 - DNA, 165 bp, Escherichia coli
ttggcagtgtttcctgtatacgatgacttatctctcccgcatcatatgggggcacgtttcttaggaaaagtgacggggttacagaagccaattacgatagtttgttgtagagttatcacgagtttttgttgttctgaagacggaatcagaaaaataattccagag

SEQ ID NO: 1439 - protein, 55 aa, Escherichia coli
LAVFPVYDDLSLPHHMGARFLGKVTGLQKPITIVCCRVITSFCCSEDGIRKIIPE

SEQ ID NO: 1440 - DNA, 162 bp, Escherichia coli
ctgaaatcaacactcagtctgcatggatgtctgaagatgttgagaatgtcgggaatggtactatatacgtattttactaagtgttttactaaacatacacgtattttcataaacacttctaaaagtgttttcattaaacattacaatacacattgctttgtc

SEQ ID NO: 1441 - protein, 54 aa, Escherichia coli
LKSTLSLHGCLKMLRMSGMVLYTYFTKCFTKHTRIFINTSKSVFIKHYNTHCFV

SEQ ID NO: 1442 - DNA, 267 bp, Escherichia coli
gtgtctttatgtaaaaacgcaaatccgattgaggtggcctggcgtgatttactgtgtgcttacgacgatttggttaaatggttttatggatgtttttgtaacgatgagattgatgagatgattaactggccctggtattttttatcagcgcaaggtaattctcttcatcatgagactcttttcagaaaaaacgtgatgattggttctggtgttttgattcagatgaggtttacgttatcgatggttaatcgtttttatggcgcggag

SEQ ID NO: 1443 - protein, 89 aa, Escherichia coli
VSLCKNANPIEVAWRDLLCAYDDLVKWFYGCFCNDEIDEMINWPWYFLSAQGNSLHHETLFRKNVMIGSGVLIQMRFTLSMVNRFYGAE

SEQ ID NO: 1444 - DNA, 204 bp, Escherichia coli
ctgattgcgtttttgatgttttgtttgcacgttctgttgatccgtttcccttcaggctttgtagtttttaaaaaccatttatgccgttgttgtgtgttttatcctgcatgtaggtttatcttttcttcgtgggggattcattctgttttaatcaggagccattggcgttgctcaatggcgggatgccgtaaagttttaccgcag

SEQ ID NO: 1445 - protein, 68 aa, Escherichia coli
LIAFLMFCLHVLLIRFPSGFVVFKNHLCRCCVFYPACRFIFSSWGIHSVLIRSHWRCSMAGCRKVLPQ

SEQ ID NO: 1446 - DNA, 729 bp, Escherichia coli
atgaatcaaccaatacacaatgcttactggttaacccgttttgacagcattctcgacagtgccctggcgcaacaccgtgccatctcgttaatccgggtggatttacgtttccctgagtatatgcctgccaccattatggataccgatttagattcagcggtgatttctcgttttttcgaatccctgaaagcaaaaattcaggcttaccagcggaaaaaacgacgagccaacaagcgtgtgcgtgcaaccactctgcattatttctggtgtcgggagtttggcaaggaaaaaggcaggaaacattatcacgtgatattactgctcaacaaagatacctggtgctcgccaggggatttcaccgttccttcttcgctggcgacactgatcaagctggcatggtgtagtgctctgcatcttgagccctggcagggtaatggactggttcatttttccaggcggacgcctttccgtaaaccgacatcatctgatgctcgcccttcttccgatgatacgcctttgtcgggtggatgttctgaaaccaggaaggcttcagacaaaaagccgggtggatccgctgtgctctgggtcaagcgtggtgatgtggaagcgatgcagaaagcccggaacagagccagttatctcgtgaaatatgagacgaagcagcatgacggttccgggcaacgtaattatggttgcagtcgtgggctggggcgtctactggatggcagg

SEQ ID NO: 1447 - protein, 243 aa, Escherichia coli
MNQPIHNAYWLTRFDSILDSALAQHRAISLIRVDLRFPEYMPATIMDTDLDSAVISRFFESLKAKIQAYQRKKRRANKRVRATTLHYFWCREFGKEKGRKHYHVILLLNKDTWCSPGDFTVPSSLATLIKLAWCSALHLEPWQGNGLVHFSRRTPFRKPTSSDARPSSDDTPLSGGCSETRKASDKKPGGSAVLWVKRGDVEAMQKARNRASYLVKYETKQHDGSGQRNYGCSRGLGRLLDGR

SEQ ID NO: 1448 - DNA, 864 bp, Escherichia coli
atgcaggatttgaggctgtttaatattgtgttcgagagcgatcctggctggatactggatttctctaaccgcaccttgtctgcttttttcgatgaagaattgaacattgatattgatgatgaacgttatcagaaagaggggacgtcaaaagccaaacgagttagatgcttgctgaaacaggttgatcgtgagaccgctctgcgggttcttggtgcgctctggcagtataaaacggaatccatgcctgaacaggctgaacaaagccgtaatgactatcttgcactgatttcccgcttagaaaacgctgacaccgatgaagccaaaggcgttaagcctgtccaggcatggcatggtgttgactggcattcacttatcgctgaaatgaacgagatgaaatctctgccgccacatccacgtggttttcggtttgaagcctggcttgctgaactgttcagtatctttaagcttgctcctcgttcgtctttccgaaatacaggcgaacagattgacggaagtttccgactgaatgatgaattttacctgatggaggcaaagtggcatcagaaaagaacgtcggctgccgacctccatgtatttgaaggaaagctcagtaccaaggcaacctggacacgcggtgtttttatcagttggatggggtttacgcctgaaggcctgacggcttttggtaaagggaagcgggttatctgtgtcagtggttatgatctttaccactcactgaatcataggatccctttacccgaccttctggatgctaaaacccggcacgcggctgaaacgggagagccctatgctgagttcggccgactatatgcactgaaagacaaacagttcggcacgctgaaa

SEQ ID NO: 1449 - protein, 288 aa, Escherichia coli
MQDLRLFNIVFESDPGWILDFSNRTLSAFFDEELNIDIDDERYQKEGTSKAKRVRCLLKQVDRETALRVLGALWQYKTESMPEQAEQSRNDYLALISRLENADTDEAKGVKPVQAWHGVDWHSLIAEMNEMKSLPPHPRGFRFEAWLAELFSIFKLAPRSSFRNTGEQIDGSFRLNDEFYLMEAKWHQKRTSAADLHVFEGKLSTKATWTRGVFISWMGFTPEGLTAFGKGKRVICVSGYDLYHSLNHRIPLPDLLDAKTRHAAETGEPYAEFGRLYALKDKQFGTLK

SEQ ID NO: 1450 - DNA, 237 bp, Escherichia coli
atggcaatccattgcattacttcaggacgacttttcagaaagcgagctaagggcgttggcataaactcaggcatcggatgctgttttacagggttcacctgccatccagtagacgccccagcccacgactgcaaccataattacgttgcccggaaccgtcatgctgcttcgtctcatatttcacgagataactggctctgttccgggctttctgcatcgcttccacatcaccacgct

SEQ ID NO: 1451 - protein, 79 aa, Escherichia coli
MAIHCITSGRLFRKRAKGVGINSGIGCCFTGFTCHPVDAPAHDCNHNYVARNRHAASSHISRDNWLCSGLSASLPHHHA

SEQ ID NO: 1452 - DNA, 153 bp, Escherichia coli
atgtgtcgctggattaacgagcattcttctttttatgaaatcctgcttaaaaatcagataattaaaagaatattttttctgctgcattttattcctgattatccggatgcgacacatcctttcaacatcatgatgcataataacatcatgaaa

SEQ ID NO: 1453 - protein, 51 aa, Escherichia coli
MCRWINEHSSFYEILLKNQIIKRIFFLLHFIPDYPDATHPFNIMMHNNIMK

SEQ ID NO: 1454 - DNA, 5662 bp, Escherichia coli
cgaagtgaaatgaaagcccgctgatgcgggcttttttgcttcttctctttagcctgattcgacactctcaatgcggccataaacaacaacccacttttcttataccgtagcctgtccccctcttcctgctttctaaccataacagatgtgagcgtttgctatgagcgatatatagtcattcgtaccctccgatactaatcatcacagaaattaatatattcattccttactgaaaagctatgaagtagatatataggattggggcgcgtatggcactggacagttatgcatctccgaatattattccggagctaagacaaccgaatgccgcagcaggtaagatcacgctaggggggctggacagaatggctgttacgcccagtgtgaagaaaagaaggctaagtatggtagaatttccatacgcacagaccttgttatccgactatacagcctggaaggcactatgacaaatctacaactggaagaaagatttagggcgcttgagaaagattacgatgcgctcatttccacaaaatatactgcgcagaacgttctcactcacactatggaaacctatgttgattctggtaaatataaaaactggatcgccagagtgaaaaagttaatagaggacagctacggaaaagagtctgattattacaatgacttcaatactgtaaacagcaggtggtcttctaattacaatacactgatcaaaagttataaaccgttgtttgatgcggcgagagatgatcttgcgcactctgctgtcagtactaatactcctcaagaaggttcgccgctgagcctcgtacttaatattcttaacaggtttccgacctttgttcgccagttaaagaggcggtacaacggccgtgcgccgcttgaagttaatgatgagtatgacgtacaggatttgatttatgcactgctgacgcttcattttaatgatattagggcgaaagagtatacccccagctttgcgggcgcggcctcaagacaggactttcttttgaaaaaagagaaaattgtgatagaggtgaagaaaacccgtgaatctctgggagcgggtaaagttggtggagagttgcttattgatatggcgcgctaccgcgctcaccaagactgcgatacgttgatcttgtttgtatatgacccggattgctacataaataatcctttgggcgtgaaaaccgatctggaatctaaagacgcggaaggaaaagtgaaggttgttattgcgcagttctgacacgcttaagtgtcaccttacaggattaggtttgcggccgtgccagcaggacgagcatgaaaaaggccgctggcacggccggatttgtcatctttgccaggtcaaatcaaaatctacgtgaaaatccgcaggcttaagctcgcaactgccaccacgcccaattaacgacgttatgtttacaacgtttgaacctgttgagatggcaagttgagtgtcatctgtaaacgtgatgattagcatttcagtctgatgaacctgtactccagttttctgaaaaccaatctggacagatttcaccgttttcccaaccatttcacgggcttgattgatagagtaattagcttcaacttgtaggtcattcctgaacttgggtagtgtcattttacatcctctttagtgaagttttcgctatttaaatcagcagcattccttttaaatcactggcatgtcagcagtggatagtctgagtgtaacgtccagtgaggggaataaatattggtcagactttgcacaaaagagccaactatcgcgggctctctctcatcatgtgcgaaaattgaccacaatatgaaatccagttccattccgaaatcaaaaaccgggagaatatctcacaggagacatagcacctttctttctgagatcatcaggaattttcttacctatataaagttgtgtgatttcaggagatgccaccctaccccggaaaccaaagcgggaacattgagtcgcttcaaactcatcgtctgcctcccatgaagtcatctctgggaaattctcacgggtagacttgagccactcatcagcgatgtatacccccctcacgatacctcttactgttgccagtatgatctcagccttacgagcgcggtcaacgctgacacgccagctaaaacgtacagcatcatagaggtcaatatcctttgaactcctattaaccgatatcattagggccttatgttggaacgtaatagtttcaggctggtacgtagcgattaattcttttatgtgtgcagcaccgaactcattactgccagcaccgttcatgatgttagttaagccgggataagcgtctatgagcgctgcttcaacctcgtaagcggtcttttcttcggccataccgtgtcgatgaataacatggatcacatcaagaccagcaagtctgatctctcgaagttgcctgagtttattattcagtaactcatcatcatccactgctgcaacctcaccacgcatatgagcaaagacacgattacctttgcctttacctacatagaacgtactgccatccctcgggtcaattaggcggtatacataccagccaagatgttcgattactccagatggaaattcattaatatccatatcacaacgcctataatttaacttataagtcacaaaatatgcacaatactgtcaattgacaacttataatccctactagttagcattatgatttccagagtgaggaatataaaaatctctgtttctggcacataacagcccttaagatcgtagctcgccatcatggggtgtcggggggcggaggttcaaatcctctcgtgccgaccaaaaatcccttaagaaccagcctattatggctggtttttttatgattgttttttatgcggagaaataccggggaataattggggtaaaacacctttaggctattcacttagcctaccaccatcaaaatctttccgaatgtatccatctcttttttcttatgcagctaaaacgaagtcttgatactgtttatttacacagataagaataatactgtctacaaacgcagtacaaaagaagtgttatgcgtattgagatctccatagccaaagacaaaatgaccaaatgccaaacggcgctgtggacgcgttaaaggaagaattaacccaacacattggcaagcgttatgacgatgtggagatgatcgtaaaagccaccagcaacgatagtttttcagttagacatactgcagataaagattgagctaaaactttcgttcaggaaactctgaatgatacctgagagtctactgaagagttgtttgttcactagttagcacgtaggaaatcattcaatactcgcactatcggaagttcaccagccagtcgtagcacgtccttgcaaacgacgtgcctacggtttcaatcacctctcaccatcaattctatcaataataattaaacagcgcctagacaaaataaataacaacaagtcaacaacctcgacaggatgccgatgggatgatgaagagataagaaagaataaccagtaaagccctaaaacgtcagcgttcagacgcgttttttacttaatcggtaacaaatacgttgtatcatagcaaaataaaatgattgttctaaatcagattaactcctcacttttgtacaatgtcgcttacaggtataccatgaaatccgagacgctaactgtccaacaactttttcaagaccgccgacaatactgtgttccattctatcaacgtgcctatgtatggactcagcaagaccagtggtcagctctactggaggatatcctagagaaagtacaatcccggctctcgggtacaaaaccaactccccatttccttggtgcggttgtactggaacctcaatcaaaaaaaggattattaggtgtagattccatacatattattgatggtcagcaacgattgaccactcttcaatatgttctggcatccatccgattagcattacgtgctacggatctttccagcttagaggctctcatttcgccttgcctgaaaaactcaaacgaagacacaatgcgaaataaagaagtagaacgcttcaaactgtggccaacttttcgggatcaaactcattttattcaaagttttaatgttgaaaatattgacgatctccgggacgtattctctgatagtttcacgcagcatggtacgttgcgtaagcattttaatcacccgccatcactagaagcattatgtttttttactgaagcctttataaaatggattaaaatagaaaaccactcaccacaagaaaatgctgtagctctaattgaggctgtcttaacagatctgaaactggtaagcatatttctcgaagctgaagatgatgcccaaataatttttgaaacattaaatgggcgaggggcggaacttcatgctacggatcttattcgcaactatatctttatgtgcgctgagcatgaaaatattaatgctattgaattatatgaaaatgagtggaagagctttgaagataaatactggtcggaaaaacaacgccgtggacgtattaataaaccacgcatggagtggctagtacatgcgacattgcaatcagaaaggcaacgtgaaattgatctgtctcgcctttacaatgagtatcgtgattatgtaagtaaggacttgtcttcacaacgagcagatctgcaagtaaagcgcctcaaacaatatgcatcacaatataaagaattggttgatggttttggcacaacccccatctcacactttggatatcgcatcgcagactatgatgtgacgacactttatccgcttgctttgttcatttcgatagctaacatcgctgatgatgagaaagcagccatgtataatgatcttgtctcctacgtagtacgaagagccgtatgtggcctgacgccaaagaattacaacaatgtatttatgaatgtattgcggcacttggctaaaacggaaatttccagtgttgagttacgtaatatcctcaataacttaaatggcgaagcctcacgttggcctggtgactcagaatttctcaacgcttgcatcaatgctccactttatcctggcaggctcgacgcaccgaaaatgcgctcaatgttaacggaacttgaaagagaactttgtcgccaagtaaagacagaaaagcctgatgttccaaatctttctaatctcgatatcgatcatcttatgcctcaaagttggtattcctgttggcctctcgaaaatggtcgtatggtgacaaattcagatgctacggtattgaaccaaattgttctgtctggaaccgatcttacccctgaacagctactggtaaggaaacggcaacaagcgatatctactttgggaaatctaactttgcttaaccttagcgtaaaccgttctgttcagaatgctgtatttctgaaaaaacgtgatgctctcatcgtccacaccaatctacgactgaacattccacttatagttaaggataaatgggatgaggatgaaatcctggagcggggtaaaaagttgggggaaattgcattgaaagtatggccaaaacacgattaatgcaattaataaaatgattatagtggccttacattagtaaggccgctactcactattaaatactttaatttgcatcaagaacagcagtgtcagccctaggtctc

SEQ ID NO: 1455 - DNA, 195 bp, Escherichia coli
atggcactggacagttatgcatctccgaatattattccggagctaagacaaccgaatgccgcagcaggtaagatcacgctaggggggctggacagaatggctgttacgcccagtgtgaagaaaagaaggctaagtatggtagaatttccatacgcacagaccttgttatccgactatacagcctggaaggcacta

SEQ ID NO: 1456 - protein, 65 aa, Escherichia coli
MALDSYASPNIIPELRQPNAAAGKITLGGLDRMAVTPSVKKRRLSMVEFPYAQTLLSDYTAWKAL

SEQ ID NO: 1457 - DNA, 786 bp, Escherichia coli
atgacaaatctacaactggaagaaagatttagggcgcttgagaaagattacgatgcgctcatttccacaaaatatactgcgcagaacgttctcactcacactatggaaacctatgttgattctggtaaatataaaaactggatcgccagagtgaaaaagttaatagaggacagctacggaaaagagtctgattattacaatgacttcaatactgtaaacagcaggtggtcttctaattacaatacactgatcaaaagttataaaccgttgtttgatgcggcgagagatgatcttgcgcactctgctgtcagtactaatactcctcaagaaggttcgccgctgagcctcgtacttaatattcttaacaggtttccgacctttgttcgccagttaaagaggcggtacaacggccgtgcgccgcttgaagttaatgatgagtatgacgtacaggatttgatttatgcactgctgacgcttcattttaatgatattagggcgaaagagtatacccccagctttgcgggcgcggcctcaagacaggactttcttttgaaaaaagagaaaattgtgatagaggtgaagaaaacccgtgaatctctgggagcgggtaaagttggtggagagttgcttattgatatggcgcgctaccgcgctcaccaagactgcgatacgttgatcttgtttgtatatgacccggattgctacataaataatcctttgggcgtgaaaaccgatctggaatctaaagacgcggaaggaaaagtgaaggttgttattgcgcagttc

SEQ ID NO: 1458 - protein, 262 aa, Escherichia coli
MTNLQLEERFRALEKDYDALISTKYTAQNVLTHTMETYVDSGKYKNWIARVKKLIEDSYGKESDYYNDFNTVNSRWSSNYNTLIKSYKPLFDAARDDLAHSAVSTNTPQEGSPLSLVLNILNRFPTFVRQLKRRYNGRAPLEVNDEYDVQDLIYALLTLHFNDIRAKEYTPSFAGAASRQDFLLKKEKIVIEVKKTRESLGAGKVGGELLIDMARYRAHQDCDTLILFVYDPDCYINNPLGVKTDLESKDAEGKVKVVIAQF

SEQ ID NO: 1459 - DNA, 291 bp, Escherichia coli
atgacactacccaagttcaggaatgacctacaagttgaagctaattactctatcaatcaagcccgtgaaatggttgggaaaacggtgaaatctgtccagattggttttcagaaaactggagtacaggttcatcagactgaaatgctaatcatcacgtttacagatgacactcaacttgccatctcaacaggttcaaacgttgtaaacataacgtcgttaattgggcgtggtggcagttgcgagcttaagcctgcggattttcacgtagattttgatttgacctggcaaaga

SEQ ID NO: 1460 - protein, 97 aa, Escherichia coli
MTLPKFRNDLQVEANYSINQAREMVGKTVKSVQIGFQKTGVQVHQTEMLIITFTDDTQLAISTGSNVVNITSLIGRGGSCELKPADFHVDFDLTWQR

SEQ ID NO: 1461 - DNA, 771 bp, Escherichia coli
atggatattaatgaatttccatctggagtaatcgaacatcttggctggtatgtataccgcctaattgacccgagggatggcagtacgttctatgtaggtaaaggcaaaggtaatcgtgtctttgctcatatgcgtggtgaggttgcagcagtggatgatgatgagttactgaataataaactcaggcaacttcgagagatcagacttgctggtcttgatgtgatccatgttattcatcgacacggtatggccgaagaaaagaccgcttacgaggttgaagcagcgctcatagacgcttatcccggcttaactaacatcatgaacggtgctggcagtaatgagttcggtgctgcacacataaaagaattaatcgctacgtaccagcctgaaactattacgttccaacataaggccctaatgatatcggttaataggagttcaaaggatattgacctctatgatgctgtacgttttagctggcgtgtcagcgttgaccgcgctcgtaaggctgagatcatactggcaacagtaagaggtatcgtgaggggggtatacatcgctgatgagtggctcaagtctacccgtgagaatttcccagagatgacttcatgggaggcagacgatgagtttgaagcgactcaatgttcccgctttggtttccggggtagggtggcatctcctgaaatcacacaactttatataggtaagaaaattcctgatgatctcagaaagaaaggtgctatgtctcctgtgagatattctcccggtttt

SEQ ID NO: 1462 - protein, 257 aa, Escherichia coli
MDINEFPSGVIEHLGWYVYRLIDPRDGSTFYVGKGKGNRVFAHMRGEVAAVDDDELLNNKLRQLREIRLAGLDVIHVIHRHGMAEEKTAYEVEAALIDAYPGLTNIMNGAGSNEFGAAHIKELIATYQPETITFQHKALMISVNRSSKDIDLYDAVRFSWRVSVDRARKAEIILATVRGIVRGVYIADEWLKSTRENFPEMTSWEADDEFEATQCSRFGFRGRVASPEITQLYIGKKIPDDLRKKGAMSPVRYSPGF

SEQ ID NO: 1463 - DNA, 246 bp, Escherichia coli
atgcgtattgagatctccatagccaaagacaaaatgaccaaaatgccaaacggcgctgtggacgcgttaaaggaagaattaacccaacacattggcaagcgttatgacgatgtggagatgatcgtaaaagccaccagcaacgatagtttttcagttagacatactgcagataaagattcagctaaaactttcgttcaggaaactctgaatgatacctgggagtctactgaagagttgtttgttcac

SEQ ID NO: 1464 - protein, 82 aa, Escherichia coli
MRIEISIAKDKMTKMPNGAVDALKEELTQHIGKRYDDVEMIVKATSNDSFSVRHTADKDSAKTFVQETLNDTWESTEELFVH

SEQ ID NO: 1465 - DNA, 1887 bp, Escherichia coli
atgaaatccgagacgctaactgtccaacaactttttcaagaccgccgacaatactgtgttccattctatcaacgtgcctatgtatggactcagcaagaccagtggtcagctctactggaggatatcctagagaaagtacaatcccggctctcgggtacaaaaccaactccccatttccttggtgcggttgtactggaacctcaatcaaaaaaaggattattaggtgtagattccatacatattattgatggtcagcaacgattgaccactcttcaatatgttctggcatccatccgattagcattacgtgctacggatctttccagcttagaggctctcatttcgccttgcctgaaaaactcaaacgaagacacaatgcgaaataaagaagtagaacgcttcaaactgtggccaacttttcgggatcaaactcattttattcaaagttttaatgttgaaaatattgacgatctccgggacgtattctctgatagtttcacgcagcatggtacgttgcgtaagcattttaatcacccgccatcactagaagcattatgtttttttactgaagcctttataaaatggattaaaatagaaaaccactcaccacaagaaaatgctgtagctctaattgaggctgtcttaacagatctgaaactggtaagcatatttctcgaagctgaagatgatgcccaaataatttttgaaacattaaatgggcgaggggcggaacttcatgctacggatcttattcgcaactatatctttatgtgcgctgagcatgaaaatattaatgctattgaattatatgaaaatgagtggaagagctttgaagataaatactggtcggaaaaacaacgccgtggacgtattaataaaccacgcatggagtggctagtacatgcgacattgcaatcagaaaggcaacgtgaaattgatctgtctcgcctttacaatgagtatcgtgattatgtaagtaaggacttgtcttcacaacgagcagatctgcaagtaaagcgcctcaaacaatatgcatcacaatataaagaattggttgatggttttggcacaacccccatctcacactttggatatcgcatcgcagactatgatgtgacgacactttatccgcttgctttgttcatttcgatagctaacatcgctgatgatgagaaagcagccatgtataatgatcttgtctcctacgtagtacgaagagccgtatgtggcctgacgccaaagaattacaacaatgtatttatgaatgtattgcggcacttggctaaaacggaaatttccagtgttgagttacgtaatatcctcaataacttaaatggcgaagcctcacgttggcctggtgactcagaatttctcaacgcttgcatcaatgctccactttatcctggcaggctcgacgcaccgaaaatgcgctcaatgttaacggaacttgaaagagaactttgtcgccaagtaaagacagaaaagcctgatgttccaaatctttctaatctcgatatcgatcatcttatgcctcaaagttggtattcctgttggcctctcgaaaatggtcgtatggtgacaaattcagatgctacggtattgaaccaaattgttctgtctggaaccgatcttacccctgaacagctactggtaaggaaacggcaacaagcgatatctactttgggaaatctaactttgcttaaccttagcgtaaaccgttctgttcagaatgctgtatttctgaaaaaacgtgatgctctcatcgtccacaccaatctacgactgaacattccacttatagttaaggataaatgggatgaggatgaaatcctggagcggggtaaaaagttgggggaaattgcattgaaagtatggccaaaacacgat

SEQ ID NO: 1466 - protein, 629 aa, Escherichia coli
MKSETLTVQQLFQDRRQYCVPFYQRAYVWTQQDQWSALLEDILEKVQSRLSGTKPTPHFLGAVVLEPQSKKGLLGVDSIHIIDGQQRLTTLQYVLASIRLALRATDLSSLEALISPCLKNSNEDTMRNKEVERFKLWPTFRDQTHFIQSFNVENIDDLRDVFSDSFTQHGTLRKHFNHPPSLEALCFFTEAFIKWIKIENHSPQENAVALIEAVLTDLKLVSIFLEAEDDAQIIFETLNGRGAELHATDLIRNYIFMCAEHENINAIELYENEWKSFEDKYWSEKQRRGRINKPRMEWLVHATLQSERQREIDLSRLYNEYRDYVSKDLSSQRADLQVKRLKQYASQYKELVDGFGTTPISHFGYRIADYDVTTLYPLALFISIANIADDEKAAMYNDLVSYVVRRAVCGLTPKNYNNVFMNVLRHLAKTEISSVELRNILNNLNGEASRWPGDSEFLNACINAPLYPGRLDAPKMRSMLTELERELCRQVKTEKPDVPNLSNLDIDHLMPQSWYSCWPLENGRMVTNSDATVLNQIVLSGTDLTPEQLLVRKRQQAISTLGNLTLLNLSVNRSVQNAVFLKKRDALIVHTNLRLNIPLIVKDKWDEDEILERGKKLGEIALKVWPKHD

SEQ ID NO: 1467 - DNA, 1401 bp, Escherichia coli
atgagagaaaaacccagtttttatgtcgcgcttacaccgatcatttttatgatgatcgtgttggttgttggcatcggtgttatgggctggcctgccagcgtctgtttattaatttcagcggcgttttcctgcattattgcaatggctaagctgaaatatacctgggatgaaatccaggggtttattatcgataagatttcggcggtgatggcaccggtacttatcgttattttcgttggctttatggtcgcgacatggagctatgcaggtacactgccgatgctggtttattacggtatgttactggttgcgcccgcatggctttatgccatagcgttttttctgaacgcagtattgtcctatgtttccggggcatcatggggatctgtcgcttctattggtgttgcattaatgggcatcggttccggcttacatgccgatcttccaattctggcggcagccattgttaccggggcttattttggcgacaaactttcaccgttaagtgataccaccaacctgacttcagcggtaaccaaaactaaactttatgatctgattaaatatctactctggacgaccatcccatcaacgattattagcctgctgttttttacctggctgggaatgattcatacttctacgggctctatttcaccagaaagcatgcagatgctggtacagctcaaagagttatataagtttggtctgttaccgctactgcctatgcttattgttctgtgctttacctttttgcgtttgcctacagtaccggcattattaagcagtgcgttcgtggccgtattggttggatggctgtatcaaggtttcccgctggccgaaggtattaaggccacaatgagtggtttccgtctgacgatgatcactgattcaacgacgctgttaccttctgtgaaagaactgcttgaacaaggcggcctgaataatcagggcggattcctgtcatttattatctgcgccatgatgtttgctggcatcctgacgggaacaggaatgatggatgtcacattacaaagtgcggcaaacaaaataaaaagtgcttttggcgctattctggcaagtggtgttttagcggtcatcattaacttgcttaccggttctgatggtttgaataagattgttatatctgaattgatgatgaagaaattcgaagatcttaatttatctccattagttttagcccgaacgctggaagattttggcaccatgagtgcgccaataattccgtggtcagccgccggattgtatatggcgacgacgctaggtgttccgacgtttagttacctgccgtactgtgtattctgtttctgctcgatgatatttgcgttgatctatgcttctacaggtttccgtttactgcgcttcaacgaagcaaaggcc

SEQ ID NO: 1468 - protein, 467 aa, Escherichia coli
MREKPSFYVALTPIIFMMIVLVVGIGVMGWPASVCLLISAAFSCIIAMAKLKYTWDEIQGFIIDKISAVMAPVLIVIFVGFMVATWSYAGTLPMLVYYGMLLVAPAWLYAIAFFLNAVLSYVSGASWGSVASIGVALMGIGSGLHADLPILAAAIVTGAYFGDKLSPLSDTTNLTSAVTKTKLYDLIKYLLWTTIPSTIISLLFFTWLGMIHTSTGSISPESMQMLVQLKELYKFGLLPLLPMLIVLCFTFLRLPTVPALLSSAFVAVLVGWLYQGFPLAEGIKATMSGFRLTMITDSTTLLPSVKELLEQGGLNNQGGFLSFIICAMMFAGILTGTGMMDVTLQSAANKIKSAFGAILASGVLAVIINLLTGSDGLNKIVISELMMKKFEDLNLSPLVLARTLEDFGTMSAPIIPWSAAGLYMATTLGVPTFSYLPYCVFCFCSMIFALIYASTGFRLLRFNEAKA

SEQ ID NO: 1469 - DNA, 1505 bp, Escherichia coli
ttaacagggaataaagttatgagagaaaaacccagtttttatgtcgcgcttacaccgatcatttttatgatgatcgtgttggttgttggcatcggtgttatgggctggcctgccagcgtctgtttattaatttcagcggcgttttcctgcattattgcaatggctaagctgaaatatacctgggatgaaatccaggggtttattatcgataagatttcggcggtgatggcaccggtacttatcgttattttcgttggctttatggtcgcgacatggagctatgcaggtacactgccgatgctggtttattacggtatgttactggttgcgcccgcatggctttatgccatagcgttttttctgaacgcagtattgtcctatgtttccggggcatcatggggatctgtcgcttctattggtgttgcattaatgggcatcggttccggcttacatgccgatcttccaattctggcggcagccattgttaccggggcttattttggcgacaaactttcaccgttaagtgataccaccaacctgacttcagcggtaaccaaaactaaactttatgatctgattaaatatctactctggacgaccatcccatcaacgattattagcctgctgttttttacctggctgggaatgattcatacttctacgggctctatttcaccagaaagcatgcagatgctggtacagctcaaagagttatataagtttggtctgttaccgctactgcctatgcttattgttctgtgctttacctttttgcgtttgcctacagtaccggcattattaagcagtgcgttcgtggccgtattggttggatggctgtatcaaggtttcccgctggccgaaggtattaaggccacaatgagtggtttccgtctgacgatgatcactgattcaacgacgctgttaccttctgtgaaagaactgcttgaacaaggcggcctgaataatcagggcggattcctgtcatttattatctgcgccatgatgtttgctggcatcctgacgggaacaggaatgatggatgtcacattacaaagtgcggcaaacaaaataaaaagtgcttttggcgctattctggcaagtggtgttttagcggtcatcattaacttgcttaccggttctgatggtttgaataagattgttatatctgaattgatgatgaagaaattcgaagatcttaatttatctccattagttttagcccgaacgctggaagattttggcaccatgagtgcgccaataattccgtggtcagccgccggattgtatatggcgacgacgctaggtgttccgacgtttagttacctgccgtactgtgtattctgtttctgctcgatgatatttgcgttgatctatgcttctacaggtttccgtttactgcgcttcaacgaagcaaaggcctgagttattcaagataataaatgcgtttgccggatggattaatctccatccggcgttaatgtcaaaattccatgttctgcagaata

SEQ ID NO: 1470 - DNA, 1581 bp, Escherichia coli
taacctgcgacaggtcctgaatacccgctccggcagttgttatggttcaccggagctggggattactgatttaaatgatgaatcgctggcctccagcgatttcagacgagaaatccgtaagtccattagccagtgcattttacattacgaacctcgtattaccgatgttgttgttacggctgctgcaccggatgaatacgcccctgtggaactgtgttttcatattgtggctacggtcgatgtcagcgaaaccaggggagtgtttgaatttgacattttgctggacaaccatcaacgctattgtgtggagtgatctctgtggcttttgaagaacgttactaccgcgaagagctggattatcttcgccagctaggcaaactgctggcgcaggaaaaaccacatctggcccactttctggccgagaaagagggtgatccggacgtggagcgtctgatggaagcctttgcctttatgtccggtagcctgcgccagaaacttgaggacgaattccccgagttcacccatgggctgatccgtatgctgtgggcaaactatttacgcccggttccggccatgacggttattgcctatgaacccaaaaccgatcagttaaaagtccctgttcaggtctgtcgtaatgaactgatcagaagccgctcagaaaagtcctccctgactgctcagaaggtgctgcctgacaatcatgataaaatcgtttcttccgtagcctgccatttcacgctggcgcgcgatatctggctgcaaccactgcgcattctcgatacccgcaacgccagcagcctgaaagaaggcatcatagatatcagttttaccgcagataacaatgtctcccccgccatgcttgacctgaacaaaatcacgttctggctgggtaatgaagacgattatacccgacaccagctttatctgtggttttgcgaatgcctgatggatgcggaactgattgccggagagtaccgcctgccgctgccggatctgtggctggaggcggcgggttttgacaaccgggatgctctgctgccgtggccgaaaaatgtccacagcggctaccgcgtgcttcaggagtatttctgctatcccgaagccttcttctttttccatctgcgcgatgttgcgccgctaccagacgatttcccgatcaatgcgtttacgctgcgcctgcactttaaccgcccgttacctgccgacatcaagctgcgccaggattcgctgcgtctgcactgtacgccagccattaacctgtttacgcattatgcggaacccgtcaggccggatgggcggatggcggaatacccgctgcgcgccagccataagcatccggacgcctatgacatttttcaggtcagcacagtcaccagtaaagtcaaagtttcaggtactgaaatcagcccaggtagccaggcgcgtgtatgggccaattttgacagcttccagcactctgatgttagttcacctcgccaggcacagctggtcttctggcatcaccgtctggatcgtccttgttcaccttgggcttgaacactcttccccctgtccatacatacggtagcatccggcagc

SEQ ID NO: 1471 - DNA, 1273 bp, Escherichia coli
gtgatctctgtggcttttgaagaacgttactaccgcgaagagctggattatcttcgccagctaggcaaactgctggcgcaggaaaaaccacatctggcccactttctggccgagaaagagggtgatccggacgtggagcgtctgatggaagcctttgcctttatgtccggtagcctgcgccagaaacttgaggacgaattccccgagttcacccatgggctgatccgtatgctgtgggcaaactatttacgcccggttccggccatgacggttattgcctatgaacccaaaaccgatcagttaaaagtccctgttcaggtctgtcgtaatgaactgatcagaagccgctcagaaaagtcctccctgactgctcagaaggtgctgcctgacaatcatgataaaatcgtttcttccgtagcctgccatttcacgctggcgcgcgatatctggctgcaaccactgcgcattctcgatacccgcaacgccagcagcctgaaagaaggcatcatagatatcagttttaccgcagataacaatgtctcccccgccatgcttgacctgaacaaaatcacgttctggctgggtaatgaagacgattatacccgacaccagctttatctgtggttttgcgaatgcctgatggatgcggaactgattgccggagagtaccgcctgccgctgccggatctgtggctggaggcggcgggttttgacaaccgggatgctctgctgccgtggccgaaaaatgtccacagcggctaccgcgtgcttcaggagtatttctgctatcccgaagccttcttctttttccatctgcgcgatgttgcgccgctaccagacgatttcccgatcaatgcgtttacgctgcgcctgcactttaaccgcccgttacctgccgacatcaagctgcgccaggattcgctgcgtctgcactgtacgccagccattaacctgtttacgcattatgcggaacccgtcaggccggatgggcggatggcggaatacccgctgcgcgccagccataagcatccggacgcctatgacatttttcaggtcagcacagtcaccagtaaagtcaaagtttcaggtactgaaatcagcccaggtagccaggcgcgtgtatgggccaattttgacagcttccagcactctgatgttagttcacctcgccaggcacagctggtcttctggcatcaccgtctggatcgtccttgttcaccttgggctttgaacactcttccccctgtccatacatacggtagcatccggcagc

SEQ ID NO: 1472 - protein, 421 aa, Escherichia coli
VAFEERYYREELDYLRQLGKLLAQEKPHLAHFLAEKEGDPDVERLMEAFAFMSGSLRQKLEDEFPEFTHGLIRMLWANYLRPVPAMTVIAYEPKTDQLKVPVQVCRNELIRSRSEKSSLTAQKVLPDNHDKIVSSVACHFTLARDIWLQPLRILDTRNASSLKEGIIDISFTADNNVSPAMLDLNKITFWLGNEDDYTRHQLYLWFCECLMDAELIAGEYRLPLPDLWLEAAGFDNRDALLPWPKNVHSGYRVLQEYFCYPEAFFFFHLRDVAPLPDDFPINAFTLRLHFNRPLPADIKLRQDSLRLHCTPAINLFTHYAEPVRPDGRMAEYPLRASHKHPDAYDIFQVSTVTSKVKVSGTEISPGSQARVWANFDSFQHSDVSSPRQAQLVFWHHRLDRPCSPWALNTLPPVHTYGSIRQ

SEQ ID NO: 1473 - DNA, 309 bp, Escherichia coli
aacctgcgacaggtcctgaatacccgctccggcagttgttatggttcaccggagctggggattactgatttaaatgatgaatcgctggcctccagcgatttcagacgagaaatccgtaagtccattagccagtgcattttacattacgaacctcgtattaccgatgttgttgttacggctgctgcaccggatgaatacgcccctgtggaactgtgttttcatattgtggctacggtcgatgtcagcgaaaccaggggagtgtttgaatttgacattttgctggacaaccatcaacgctattgtgtggag

SEQ ID NO: 1474 - protein, 103 aa, Escherichia coli
NLRQVLNTRSGSCYGSPELGITDLNDESLASSDFRREIRKSISQCILHYEPRITDVVVTAAAPDEYAPVELCFHIVATVDVSETRGVFEFDILLDNHQRYCVE

SEQ ID NO: 1475 - DNA, 2725 bp, Escherichia coli
aatcgtcatggggctaaaatccccgaataagagtttgtaaaatccaagatacagtctgactgtttcaggttctttaatccgcgatataacgaagctcccggagctgcgtaaggtctttttggacttaatatttgacaaaggtcataagaattctttttcccgagacagacggcacgaagcgctctttctgctgtgttattgtccgcctccgccagaccgtcatcactgtaataacagagggcgtcccactgattcaggacatagctgaacgcttcgcccagtctggattttttcgacaacgtgccattcttctccaccatccattcatgcagcgacgtcagtaacgctttgcttcgctgctgcctggctgcaagacgttcagactccggtaagccccgtatttcatcctcaatggcgtacagttcactgatgcgcttcagagcttcttctgccgtcgtacttttgctgctgatgtatacatcgtggatttttcgccgggcatgggcccagcacgcaacttctgtcagtgcaccaccttcacgttcggcactgaacagccgatcgtaaccgctgaatgcatccgcctgcaggataccccggaagggacgaaggtgttgtaccggatgttttccctgcctgtctggtgagtaggcgaaccagaccgccggtggctctgatgagcccgcattccggtcatcccggacatacgtccagatgcgtcctgtttttgccttttttctgcccggtgccagcacttttactggtatgtcgtcagtgtgaaccttgcgggtgttcatcacgtaacggtacagggcatcattcagcggagtcattaactggcagcacgcgtcaacccagttggagagtaatgcacggctcagttcggcaccctgtcgggcaaagatttcactctgacgatacagtggcaggtgttcgcagtattttcccgttaacacgcgggcaagtaatccggagcccgcgatgccgcgctctatcgggcgggacggcgctggcgcttcaactatacagtcacattttgtacaggctttttttacccgaacagtgcggatcactttcagggcgctactcaccagttccagctgctcagcactgacttcacccagataatccagctcactgccacactccgggcaacagctttcttcagactccagacggtgtatttcacggggaaggtgtgccggtaacggacgacgatggcgcgactgtcgcaactggcggggaacctgtggatcgtcttcccacccactgtaacgatcgctgtcctgtcggcgttgattcagcagggcctcagcctgttcaacttcacgacgcagtttttcagaacgggtaccgaacagcatccggcgcagtttttctatctgggccctcagatgttctgtttcccgctcctcctcttcgatcttttcttcggcacgtgccagtgcagagcgcaggaaggcctccgtctcttcaaccagactcagttgctgatctttctgacggagggcttcagcctgctcagagagtagcctttccagctcagtgatacgaatgaggtatttccgactcatgaccgtttttataatccggccatgacatttttacaacattgtcagtgcattaaggcgggatgttttgggttgacgccagtccagtttatcgaggaacattgccagctgcgagcgggtaatggataccttaccgtcacgcaccgcaggccagataaactggccttcctccagacgtttggtgaacaggcacagaccatcagcatcagcccacaggattttaatcgtgtcaccccgtcggccgcgaaagataaacaggtgaccggagaaggggttctcatccagcacatgttgtacctgttcacccagaccgttgaaggatttacgcatatcagtaacgccggcaaccagccagattcgagtgtctgatgggagcgagatcatcgtcctctcccggtcagttcacggatcaacaccgtgagcagctctggtgacggattttccagcgtcatgttaccgtggcggaactcaactttacaggaactggcactgactgtgctttgtgaaggagtggataaaagcggagtaagagccgccacaggctctttctgctcatcaggcgttatctcaacaggtaataattcaacgccagcgccagaagaggttgttaccggaagacgccgcgatatacgcccttcgttctgccagagcctgagccatttgaacaggaggttatcattgatatcgtgttccctggcaatacgggcaacagaggctcctggttgtgaagccagtttaaccatttgaagtttaaactcatttgaaaatgttctgcggggttctgcggggttctgcggggttctgcggataatattttctgttccataacaggtgtccactagttgaaaaagtgggcacctacgttaccaatactggcttaatggctacatacggcggtcagtttacgcttacagaaatgtaataaacacgtcctacaattaactgaagagcatggtgacggatgaaggaaaaagcaggagtgtgtggtgcctcacagatttccgacatcatagctgtcaacgacggatgaaaagcggctcttccgcaacttgggtggaagaaaatggatgaaactttctggtgtgagaaccttaaggaaacaacatgttgggtggagcggacaatccaaatggtgaattaccgtcttatatcac

SEQ ID NO: 1476 - DNA, 1566 bp, Escherichia coli
atgagtcggaaatacctcattcgtatcactgagctggaaaggctactctctgagcaggctgaagccctccgtcagaaagatcagcaactgagtctggttgaagagacggaggccttcctgcgctctgcactggcacgtgccgaagaaaagatcgaagaggaggagcgggaaacagaacatctgagggcccagatagaaaaactgcgccggatgctgttcggtacccgttctgaaaaactgcgtcgtgaagttgaacaggctgaggccctgctgaatcaacgccgacaggacagcgatcgttacagtgggtgggaagacgatccacaggttccccgccagttgcgacagtcgcgccatcgtcgtccgttaccggcacaccttccccgtgaaatacaccgtctggagtctgaagaaagctgttgcccggagtgtggcagtgagctggattatctgggtgaagtcagtgctgagcagctggaactggtgagtagcgccctgaaagtgatccgcactgttcgggtaaaaaaagcctgtacaaaatgtgactgtatagttgaagcgccagcgccgtcccgcccgatagagcgcggcatcgcgggctccggattacttgcccgcgtgttaacgggaaaatactgcgaacacctgccactgtatcgtcagagtgaaatctttgcccgacagggtgccgaactgagccgtgcattactctccaactgggttgacgcgtgctgccagttaatgactccgctgaatgatgccctgtaccgttacgtgatgaacacccgcaaggttcacactgacgacataccagtaaaagtgctggcaccgggcagaaaaaaggcaaaaacaggacgcatctggacgtatgtccgggatgaccggaatgcgggctcatcagagccaccggcggtctggttcgcctactcaccagacaggcagggaaaacatccggtacaacaccttcgtcccttccggggtatcctgcaggcggatgcattcagcggttacgatcggctgttcagtgccgaacgtgaaggtggtgcactgacagaagttgcgtgctgggcccatgcccggcgaaaaatccacgatgtatacatcagcagcaaaagtacgacggcagaagaagctctgaagcgcatcagtgaactgtacgccattgaggatgaaatacggggcttaccggagtctgaacgtcttgcagccaggcagcagcgaagcaaagcgttactgacgtcgctgcatgaatggatggtggagaagaatggcacgttgtcgaaaaaatccagactgggcgaagcgttcagctatgtcctgaatcagtgggacgccctctgttattacagtgatgacggtctggcggaggcggacaataacacagcagaaagagcgcttcgtgccgtctgtctcgggaaaaagaattcttatgacctttgtcaaatattaagtccaaaaagaccttacgcagctccgggagcttcgttatatcgcggattaaagaacctgaaacagtcagactgtatcttggattttacaaactcttattcggggattttagcccca

SEQ ID NO: 1477 - protein, 522 aa, Escherichia coli
MSRKYLIRITELERLLSEQAEALRQKDQQLSLVEETEAFLRSALARAEEKIEEEERETEHLRAQIEKLRRMLFGTRSEKLRREVEQAEALLNQRRQDSDRYSGWEDDPQVPRQLRQSRHRRPLPAHLPREIHRLESEESCCPECGSELDYLGEVSAEQLELVSSALKVIRTVRVKKACTKCDCIVEAPAPSRPIERGIAGSGLLARVLTGKYCEHLPLYRQSEIFARQGAELSRALLSNWVDACCQLMTPLNDALYRYVMNTRKVHTDDIPVKVLAPGRKKAKTGRIWTYVRDDRNAGSSEPPAVWFAYSPDRQGKHPVQHLRPFRGILQADAFSGYDRLFSAEREGGALTEVACWAHARRKIHDVYISSKSTTAEEALKRISELYAIEDEIRGLPESERLAARQQRSKALLTSLHEWMVEKNGTLSKKSRLGEAFSYVLNQWDALCYYSDDGLAEADNNTAERALRAVCLGKKNSYDLCQILSPKRPYAAPGASLYRGLKNLKQSDCILDFTNSYSGILAP

SEQ ID NO: 1478 - DNA, 348 bp, Escherichia coli
atgatctcgctcccatcagacactcgaatctggctggttgccggcgttactgatatgcgtaaatccttcaacggtctgggtgaacaggtacaacatgtgctggatgagaaccccttctccggtcacctgtttatctttcgcggccgacggggtgacacgattaaaatcctgtgggctgatgctgatggtctgtgcctgttcaccaaacgtctggaggaaggccagtttatctggcctgcggtgcgtgacggtaaggtatccattacccgctcgcagctggcaatgttcctcgataaactggactggcgtcaacccaaaacatcccgccttaatgcactgacaatgttg

SEQ ID NO: 1479 - protein, 116 aa, Escherichia coli
MISLPSDTRIWLVAGVTDMRKSFNGLGEQVQHVLDENPFSGHLFIFRGRRGDTIKILWADADGLCLFTKRLEEGQFIWPAVRDGKVSITRSQLAMFLDKLDWRQPKTSRLNALTML

SEQ ID NO: 1480 - DNA, 360 bp, Escherichia coli
atggttaaactggcttcacaaccaggagcctctgttgcccgtattgccagggaacacgatatcaatgataacctcctgttcaaatggctcaggctctggcagaacgaagggcgtatatcgcggcgtcttccggtaacaacctcttctggcgctggcgttgaattattacctgttgagataacgcctgatgagcagaaagagcctgtggcggctcttactccgcttttatccactccttcacaaagcacagtcagtgccagttcctgtaaagttgagttccgccacggtaacatgacgctggaaaatccgtcaccagagctgctcacggtgttgatccgtgaactgaccgggagaggacga

SEQ ID NO: 1481 - protein, 120 aa, Escherichia coli
MVKLASQPGASVARIAREHDINDNLLFKWLRLWQNEGRISRRLPVTTSSGAGVELLPVEITPDEQKEPVAALTPLLSTPSQSTVSASSCKVEFRHGNMTLENPSPELLTVLIRELTGRGR

SEQ ID NO: 1482 - DNA, 4577 bp, Escherichia coli
  misc_feature (4551)..(4555): unknown
  misc_feature (4562)..(4567): unknown
  misc_feature (4569)..(4570): unknown
ttttttgaaatcagcgactttagaattgtgacgaagatctgtgttggcgcacaaatcaacggggattactgtcgtttaatgtgatttaaactgtgaaatagtatggttttcagttatggaaacgccgggagcggggaaaacttgctttttcccgtttccggggttggacaactgagcaacgcgaaggcgtcagctacgatgttccggtgactgctgaacagcccctgttgtattcagccattctccggtcatctgcagcagttttctggcatcgtggcttctgagcaacggaataccagcctgcctcagaacctcttccagaagaatatcccggcgtctgcgttccggtcgtaaatggctggcatcatccagctctactgctgcaacaatactgaacgaacgccgctcaacgataaccacatcaacatgccactgagacaccatcctgaataactgccaccactggcgtgatcgtggccggatattcccgttcagctggacgatatccgcgacccgtacctgcggacacagataccaccgcttcatatccacaattctgaacagtcctttcataaaactgacttccctttctgtcagcagcgtcttctgacgttgccagtattcaccgccggacagtattcgctctgcatcaccggtccgtatacctgccgcatgcaattgcatcagcaaaggagaatgctgatttacacttctgaggataatccggataagtaacgctgcaataatcagaacaataagaataaaaataatcagcttcattgtttatctgctcctggtaattaattatgctgaattattaccttacatatttccatatctcttttggtatcctgtcatataactttccggtgattaattccgctaaccggtggtctgctgctgaattaaatgattcacgttcactgtttaataaactgtctctgtttttatgaataattttttccagcgtattgactgatgaacatcgccgtaactgatacagccattcctgttttgttttcgccatttttattcccgctgagaacagatgaatgataagattgccatcgctttatttacggtgtctccatatccaggggggaaccggatcagcatctgaccagagcccacgtttttgttgtctggcttcgttctgaaggacaggcagcacgggatctgtgttgtactgctcatatacccaggcagccccggcccggaccataaactgattaacattcattccgtctggtgcataaacctgcccgagaatacgaccataacgatctcgctgaaaatatgtgacggtaaccgtttttcctgcaaccagtgatttcatcatgtccgttgaccaccggccataatcctgtttcttttccggtgcatcaatatttatcagcctgatccgcactgccttccgtgagtccatgacctcgatggtatcaccgtccagtacacgaacaacccgtccatgaatatctgcacacaataccggccatgaaaagataaataataccagtggaatatatttcctcatgttattctccatatcagataaatggcacctgtatttcaggtaatcctgaatatcgcagcacacactgaataacaccttattttgtgaaattaatcacaaaatataaaatcacgacttaatatggaaaaaactctgtgctactcagaactgtccggtcatactttccgaccggatattaaaaaaagcaaatctcatgcattattcagccttctgaatccctggagtaatgaaggctgctttttcgttacacccttccccggcagcgccggtggcagtgttcagccctttttcgggcaaactgctgccagtctgtccggggagcagactgcgcagcccgtagccatgcctcagcggctcccggccagtcccccctgacttccagccggacagcccggcgtccgacctgccggtagcgccataccccggagttttgcgaatcacgccctgttccgttcattttccttccccctttaatccaggccggtgaatgtgttataaatttttataaccttcttctgccgggtatggaagaaggtttcagagaagccttatttttccgcctcctttagtgtgaaggaggcttttttattgttcatcaagcacggcctgaagttctgcctttatccggttctggcggcggattttatccagacgctctgccgcatacacttcttcctcctgagaaatatgctccgtcacatacccttccgtgtcataccggcaggcaccggctttcatggcacacagatagctttctgaacgggtgatggccttcaccgccctgcgcagttttttatgcgagagcgggatattccgctgcgccacgtcttccagtaacacgtcccggataccgcaggccagaagtcggggtgtgtcaccgtcaaataatcccggccaccagggtttcagggtgttcacggcctcatccagcgagggcaggttcagataaatggacagcgcctgtctggcctgcgctttttttgctgtcagctctgcttcccgggcagccttcaccgccagtttctgctttttcaccttccattttggtggcgtggtgacattgatgatggttttccggctcagggtcggtgtttccccttccgttttccgtttcagtgtcagtaccggtcgtttctgctctgtcatgaatgccctgacctttgtgaaaatatgtcctccaggtcgttgaaactactcactatgatattaagctgacctcaacgacctctgacatattaataccgacaattaaagatgttttttaaaccattgcgtctgtactgccgccacacgttcaaaaaacgcgccttcataaatatcataatggcatgcgtcagcttcctcgtataattccttagtaccagaagcaacagcatcatataaggcttttccctgttctggtggattaacactatcctggccggcaataacaatcaaaactgggcactgtactttggctgcgctctctgccggtttatattgcaacgtctccataaccgtaaggaaaggtatttttatatccatttcaggatactgaccttttaccttctcgaagaatacctttgattcattatcactcagtacccgggtaacccccacaaacatctctttcccggtgtttttcttcttctctgccattttattcagcgtggacagaaaagacgctctctccgattcattcatctctccggtaaccagaacatcaccgtcagcaaaagccagctggctgacaatacattttacgcgttggtcctgcgcagctgcactgaagacatgcccccctcccagcgatgttccccataacccaatacgctgattatcaatacattcctgcttttctgcccaattgataactgaaataatatcttcggtctgcattgcaggaaccagacgccctcgttctccatcactctcaccgaatcctcgataatcaaaagtaatcgttgcgaatcctgcttctgtgaaggcattcgcaaagcaagggagcagaacattcctgataccgcaaaacccatggcataagataatcaaaggatgttttatatttccttcaggaacacgaaatgtcagggcaataccttcagagagtttgtgatccgtaattttcataaatatcctgtgttatgttgtttattaataatcagaatcagcgtcagtatcataccagtcacaacgccagaacgcccagcacagccagatgacaggcgtagaataccgggaaaaaatccccgggccagaaacggggtaatgattttcctgcacacgacaccagaccaacggtcagcaccgtcattacaagaccggccaccgccgctgcatcactggaggcaaggttaagtgccggaataacggccagcaggcatgcaagcagcgccagacgttccgctctgtcttccgcccggtacagtcggtaactgaccgccagcatcagcagcccggcaatgccgtaactggtgccggacaaaggcccccacagggccatcagaagaatggccgctgctgtacgccacccactgcgcgtttcacaccacgtcagcacctgtgccgccactgcaaaggcaaacaggatattcccctcataccagggaaagccggccagataatatgcgaactgggcaataattccccatccccacagccggttaatggccggttgccggatatgcgcatgacgggacagattcagcccccacaccagggcaaacagcggaaaggctcctcgcccggccagaaacatccattcctgcttcagctggaatatcagattgatgtggtccagtaccatcagcaccagcgccaccgttttgatgatatcccgctgtccgggtgaccagaccagaaacgactgcaaccaggtatcggtccgtgcagccagtgaatcgttacgtgtcgtgttcgtgttatccgttgtcatcagaatttgtcttcctgtatcagtctccgcccagggttttctctttctgcaggtcacgaaccatggaagcttggcgtgataatgtcaatggtgtatcaatttnnnnnaaaaaannnnnnannatccact

SEQ ID NO: 1483 - DNA, 588 bp, Escherichia coli
atgaagctgattatttttattcttattgttctgattattgcagcgttacttatccggattatcctcagaagtgtaaatcagcattctcctttgctgatgcaattgcatgcggcaggtatacggaccggtgatgcagagcgaatactgtccggcggtgaatactggcaacgtcagaagacgctgctgacagaaagggaagtcagttttatgaaaggactgttcagaattgtggatatgaagcggtggtatctgtgtccgcaggtacgggtcgcggatatcgtccagctgaacgggaatatccggccacgatcacgccagtggtggcagttattcaggatggtgtctcagtggcatgttgatgtggttatcgttgagcggcgttcgttcagtattgttgcagcagtagagctggatgatgccagccatttacgaccggaacgcagacgccgggatattcttctggaagaggttctgaggcaggctggtattccgttgctcagaagccacgatgccagaaaactgctgcagatgaccggagaatggctgaatacaacaggggctgttcagcagtcaccggaacatcgtagc

SEQ ID NO: 1484 - protein, 196 aa, Escherichia coli
MKLIIFILIVLIIAALLIRIILRSVNQHSPLLMQLHAAGIRTGDAERILSGGEYWQRQKTLLTEREVSFMKGLFRIVDMKRWYLCPQVRVADIVQLNGNIRPRSRQWWQLFRMVSQWHVDVVIVERRSFSIVAAVELDDASHLRPERRRRDILLEEVLRQAGIPLLRSHDARKLLQMTGEWLNTTGAVQQSPEHRS

SEQ ID NO: 1485 - DNA, 207 bp, Escherichia coli
atggcgaaaacaaaacaggaatggctgtatcagttacggcgatgttcatcagtcaatacgctggaaaaaattattcataaaaacagagacagtttattaaacagtgaacgtgaatcatttaattcagcagcagaccaccggttagcggaattaatcaccggaaagttatatgacaggataccaaaagagatatggaaatatgtaagg

SEQ ID NO: 1486 - protein, 69 aa, Escherichia coli
MAKTKQEWLYQLRRCSSVNTLEKIIHKNRDSLLNSERESFNSAADHRLAELITGKLYDRIPKEIWKYVR

SEQ ID NO: 1487 - DNA, 471 bp, Escherichia coli
atggagaataacatgaggaaatatattccactggtattatttatcttttcatggccggtattgtgtgcagatattcatggacgggttgttcgtgtactggacggtgataccatcgaggtcatggactcacggaaggcagtgcggatcaggctgataaatattgatgcaccggaaaagaaacaggattatggccggtggtcaacggacatgatgaaatcactggttgcaggaaaaacggttaccgtcacatattttcagcgagatcgttatggtcgtattctcgggcaggtttatgcaccagacggaatgaatgttaatcagtttatggtccgggccggggctgcctgggtatatgagcagtacaacacagatcccgtgctgcctgtccttcagaacgaagccagacaacaaaaacgtgggctctggtcagatgctgatccggttcccccctggatatggagacaccgtaaa

SEQ ID NO: 1488 - protein, 157 aa, Escherichia coli
MENNMRKYIPLVLFIFSWPVLCADIHGRVVRVLDGDTIEVMDSRKAVRIRLINIDAPEKKQDYGRWSTDMMKSLVAGKTVTVTYFQRDRYGRILGQVYAPDGMNVNQFMVRAGAAWVYEQYNTDPVLPVLQNEARQQKRGLWSDADPVPPWIWRHRK

SEQ ID NO: 1489 - DNA, 210 bp, Escherichia coli
atgaacggaacagggcgtgattcgcaaaactccggggtatggcgctaccggcaggtcggacgccgggctgtccggctggaagtcaggggggactggccgggagccgctgaggcatggctacgggctgcgcagtctgctccccggacagactggcagcagtttgcccgaaaaagggctgaacactgccaccggcgctgccggggaagggtg

SEQ ID NO: 1490 - protein, 70 aa, Escherichia coli
MNGTGRDSQNSGVWRYRQVGRRAVRLEVRGDWPGAAEAWLRAAQSAPRTDWQQFARKRAEHCHRRCRGRV

SEQ ID NO: 1491 - DNA, 558 bp, Escherichia coli
atgacagagcagaaacgaccggtactgacactgaaacggaaaacggaaggggaaacaccgaccctgagccggaaaaccatcatcaatgtcaccacgccaccaaaatggaaggtgaaaaagcagaaactggcggtgaaggctgcccgggaagcagagctgacagcaaaaaaagcgcaggccagacaggcgctgtccatttatctgaacctgccctcgctggatgaggccgtgaacaccctgaaaccctggtggccgggattatttgacggtgacacaccccgacttctggcctgcggtatccgggacgtgttactggaagacgtggcgcagcggaatatcccgctctcgcataaaaaactgcgcagggcggtgaaggccatcacccgttcagaaagctatctgtgtgccatgaaagccggtgcctgccggtatgacacggaagggtatgtgacggagcatatttctcaggaggaagaagtgtatgcggcagagcgtctggataaaatccgccgccagaaccggataaaggcagaacttcaggccgtgcttgatgaacaa

SEQ ID NO: 1492 - protein, 186 aa, Escherichia coli
MTEQKRPVLTLKRKTEGETPTLSRKTIINVTTPPKWKVKKQKLAVKAAREAELTAKKAQARQALSIYLNLPSLDEAVNTLKPWWPGLFDGDTPRLLACGIRDVLLEDVAQRNIPLSHKKLRRAVKAITRSESYLCAMKAGACRYDTEGYVTEHISQEEEVYAAERLDKIRRQNRIKAELQAVLDEQ

SEQ ID NO: 1493 - DNA, 858 bp, Escherichia coli
atgaaaattacggatcacaaactctctgaaggtattgccctgacatttcgtgttcctgaaggaaatataaaacatcctttgattatcttatgccatgggttttgcggtatcaggaatgttctgctcccttgctttgcgaatgccttcacagaagcaggattcgcaacgattacttttgattatcgaggattcggtgagagtgatggagaacgagggcgtctggttcctgcaatgcagaccgaagatattatttcagttatcaattgggcagaaaagcaggaatgtattgataatcagcgtattgggttatggggaacatcgctgggaggggggcatgtcttcagtgcagctgcgcaggaccaacgcgtaaaatgtattgtcagccagctggcttttgctgacggtgatgttctggttaccggagagatgaatgaatcggagagagcgtcttttctgtccacgctgaataaaatggcagagaagaagaaaaacaccgggaaagagatgtttgtgggggttacccgggtactgagtgataatgaatcaaaggtattcttcgagaaggtaaaaggtcagtatcctgaaatggatataaaaatacctttccttacggttatggagacgttgcaatataaaccggcagagagcgcagccaaagtacagtgcccagttttgattgttattgccggccaggatagtgttaatccaccagaacagggaaaagccttatatgatgctgttgcttctggtactaaggaattatacgaggaagctgacgcatgccattatgatatttatgaaggcgcgttttttgaacgtgtggcggcagtacagacgcaatggtttaaaaaacatctt

SEQ ID NO: 1494 - protein, 286 aa, Escherichia coli
MKITDHKLSEGIALTFRVPEGNIKHPLIILCHGFCGIRNVLLPCFANAFTEAGFATITFDYRGFGESDGERGRLVPAMQTEDIISVINWAEKQECIDNQRIGLWGTSLGGGHVFSAAAQDQRVKCIVSQLAFADGDVLVTGEMNESERASFLSTLNKMAEKKKNTGKEMFVGVTRVLSDNESKVFFEKVKGQYPEMDIKIPFLTVMETLQYKPAESAAKVQCPVLIVIAGQDSVNPPEQGKALYDAVASGTKELYEEADACHYDIYEGAFFERVAAVQTQWFKKHL

SEQ ID NO: 1495 - DNA, 744 bp, Escherichia coli
atgacaacggataacacgaacacgacacgtaacgattcactggctgcacggaccgatacctggttgcagtcgtttctggtctggtcacccggacagcgggatatcatcaaaacggtggcgctggtgctgatggtactggaccacatcaatctgatattccagctgaagcaggaatggatgtttctggccgggcgaggagcctttccgctgtttgccctggtgtgggggctgaatctgtcccgtcatgcgcatatccggcaaccggccattaaccggctgtggggatggggaattattgcccagttcgcatattatctggccggctttccctggtatgaggggaatatcctgtttgcctttgcagtggcggcacaggtgctgacgtggtgtgaaacgcgcagtgggtggcgtacagcagcggccattcttctgatggccctgtgggggcctttgtccggcaccagttacggcattgccgggctgctgatgctggcggtcagttaccgactgtaccgggcggaagacagagcggaacgtctggcgctgcttgcatgcctgctggccgttattccggcacttaaccttgcctccagtgatgcagcggcggtggccggtcttgtaatgacggtgctgaccgttggtctggtgtcgtgtgcaggaaaatcattaccccgtttctggcccggggattttttcccggtattctacgcctgtcatctggctgtgctgggcgttctggcgttg

SEQ ID NO: 1496 - protein, 248 aa, Escherichia coli
MTTDNTNTTRNDSLAARTDTWLQSFLVWSPGQRDIIKTVALVLMVLDHINLIFQLKQEWMFLAGRGAFPLFALVWGLNLSRHAHIRQPAINRLWGWGIIAQFAYYLAGFPWYEGNILFAFAVAAQVLTWCETRSGWRTAAAILLMALWGPLSGTSYGIAGLLMLAVSYRLYRAEDRAERLALLACLLAVIPALNLASSDAAAVAGLVMTVLTVGLVSCAGKSLPRFWPGDFFPVFYACHLAVLGVLAL

SEQ ID NO: 1497 - DNA, 2103 bp, Escherichia coli
taaagtgcgaaatatctgaggatgccggatagcttcaggcaaaataataatgattcttgcagatgtgtttttccggatacaaaaacaaatgataaaaattgcagcgccaggcacctttcaaagcagggagacctgtaccgcgtcgaaaatttcagccagttaatatcattgtctgaaccaggcactttgcccgggcaggagaaggagttgtggcggtctcagcccggaacaatttgaaaaccataatctcgcttagggccgtgtccacattacgtgggtaggatcactcctggattttctctttttggacattgacgtctccattggtttaaacacggcaatggagactgcggtgaaaagagttaattcccggagtgactggctggatgccaatcaatgatcggaagcatgccaaactgtgaacggagatggatgccgccaaatcatgatcgattcagatgccatatttgcaatatcgcgttaatcgtcagttcagccgggatatattagcgggccagggatccgggaaaatgccacctgattgccaccagacaatttcttcttcagaaagaaaacagttaattaaggcggaggtaaaatcatggacttcatcagaacgtcctataatcgttacatctcctgtctccaaaccgccccagagtttctgcaaagcagagcgctcttcgtgggtcaggtgattatcaggggctgccaatacaccggaattccagtagctgataaactccagattgatgcttcctgcggcctggttccagagcagagccatgtcaggtcttcctggtagccagaaaaagcctttattacgataattacgtagcgttcagtgatgatctgctaataatattctgtcgatccgctaagtgtcagtgtatgcggtaagcccgcccttgagtcactatttggcaactgctacatctaaggtgacgttattcgctggcgccgatattttctcgatgggagataaccctgcacactatgcagtgtaatactcgagctactgcaaggttacgcaattcagtctttactgccgttcttacattcgatttgggtatgaaggctttcatcgttttaacacctttctgcaattccattgttctgagagctttccaccgctgttgtacaaggtacatggcacagttgtgtcattaacttctgtatttcgtcagtgagaacccggtgattacgtagttcatcttttgtccagtggattggttgccgtataaaggatcttatcaacaaagcacagttcctctatgtcagcgacgacgtagtgctatggctctttcccaaacgcccatttctgactgttcctgcaacgccggttagctgtcactatttttatggattcgataaaaaatcttcatcatgtatgatcgattttgtcgatcgattcgatcgaattttctccttttaccctgccttttgcatggttttaaaataggcaaaattacttgtcattcgtggaaagtgatggcggagataactgagcttaaaacgtttctcttgtctccgtcacttgccataccagccaggaaaagaagatgtcagcacaagaaaaaacagtacagattgattcttttgatgcgaaatttttagatataaatacattaagcaagcttatttatgaacgtaagagttttgtgatcgaaaatgtttccgatgttagtgaaacggtaaaaagagtggagcatgaaatagagaaaacgaaattaagttgtcgtgtatatactgagtacaggagtacagctttagctggttctttatggtcaccaaccgtaattctgggagtggcgagtgcagtagcaataggtgttcataatttatctacatggaaccccgattatgcaatcggtaagaactatattaaacggagataatcggtacaatataaaaaggcagaagtattgtgatcggttactccagtgcacctgcctgtttgtattctggagaggttgtattcacataatttcagacaggcgttcacgtcctctctgagaagatatatttattttgtgtagagtaaaagtctggcttccgtagtgtaggagtgttgacgctgcctttagaccggtttttaaatat

SEQ ID NO: 1498 - DNA, 219 bp, Escherichia coli
ctgaggatgccggatagcttcaggcaaaataataatgattcttgcagatgtgtttttccggatacaaaaacaaatgataaaaattgcagcgccaggcacctttcaaagcagggagacctgtaccgcgtcgaaaatttcagccagttaatatcattgtctgaaccaggcactttgcccgggcaggagaaggagttgtggcggtctcagcccggaacaatt

SEQ ID NO: 1499 - protein, 73 aa, Escherichia coli
LRMPDSFRQNNNDSCRCVFPDTKTNDKNCSARHLSKQGDLYRVENFSQLISLSEPGTLPGQEKELWRSQPGTI

SEQ ID NO: 1500 - DNA, 201 bp, Escherichia coli
atggacttcatcagaacgtcctataatcgttacatctcctgtctccaaaccgccccagagtttctgcaaagcagagcgctcttcgtgggtcaggtgattatcaggggctgccaatacaccggaattccagtagctgataaactccagattgatgcttcctgcggcctggttccagagcagagccatgtcaggtcttcctgg

SEQ ID NO: 1501 - protein, 67 aa, Escherichia coli
MDFIRTSYNRYISCLQTAPEFLQSRALFVGQVIIRGCQYTGIPVADKLQIDASCGLVPEQSHVRSSW

SEQ ID NO: 1502 - DNA, 333 bp, Escherichia coli
atgtcagcacaagaaaaaacagtacagattgattcttttgatgcgaaatttttagatataaatacattaagcaagcttatttatgaacgtaagagttttgtgatcgaaaatgtttccgatgttagtgaaacggtaaaaagagtggagcatgaaatagagaaaacgaaattaagttgtcgtgtatatactgagtacaggagtacagctttagctggttctttatggtcaccaaccgtaattctgggagtggcgagtgcagtagcaataggtgttcataatttatctacatggaaccccgattatgcaatcggtaagaactatattaaacggaga

SEQ ID NO: 1503 - protein, 111 aa, Escherichia coli
MSAQEKTVQIDSFDAKFLDINTLSKLIYERKSFVIENVSDVSETVKRVEHEIEKTKLSCRVYTEYRSTALAGSLWSPTVILGVASAVAIGVHNLSTWNPDYAIGKNYIKRR

SEQ ID NO: 1504 - DNA, 3424 bp, Escherichia coli
ttacgataccgaagccctgactgttcccgcagttggggcttcaactttctgctctatcagttatatctttcccttcgtatacttcacctatattgctaatgctggcagaacatccaagatgcttgtatcttatgatgtccaacacgcagtcactacacagcatccgacctgtttctttagagtaaatgtatgtttgatcagcgtctgattcgctaatgccgcagaaacaacattctttactcataccatcaccccctctctcttcaagctgtccagcacccgtttaattacttctgcgctaaacgatcgacactcttcctttgctttctcttcaaggattttttctaacttctctggcatacgcagtgtttttaccttcattgcatcctccgctgtatgtggtacgcatacatagtatttaggtacgcattgatagtcaatagacacctacatatcctgtggtaaaaaattattcagggtgtgccgatgtctgatcgtaagtacaaaaaccctcaagtgaatctgaggcttcctgtagagataaaggaacgtcttattgaactggctgaggctaattctcgttcattaaatgctgagatggtcgctgcacttgaagcatggaccgaaaaaaataaacacattcaagcactagaccttgcaactatagcatcacgattgatagatcttgaacatgatgttgagaagttgaaatgcatgtatggcaacaataaagacgaaagttagagatactaacttggagtgatggcatggctagagatgatccgcactttaacttccgtatgcctttggaagtaagagaaaaattgaaattaagagccgaggctaacggaaggtcaatgaactctgagttattacaaatcgttcaggatgcgctatcaaaaccatcaccgattgcaggttaccgtgacgaagcagaacgtatggctgatcagcaagcagaaattgttaagaagatggtgtttgaaaccctgaaaaaaatgtacgagaccagataggtcaatgtttgttcgttgatataaaataacaaggtatacattgtgattgagataggcgttatggccatcctgaatcaagagccaggaaaaattgaaaacgttttttctgacatatcaacatctatcgagcgttcaatttcagactttgatcgcagtcatagcggctctttgtctaaaaaacaggcttctgaagctcttagcaagatctactgcgttatgtcacctgtagaggaagtttgcaaaaagtacattacattcattgacatattaagtaatggtacagaagaagatatttcctcacttaatattcaacatgacgatgtagatatgttgaacgatcagatatctaagcttgattatggtatcgcgaaactgttgtataccttcttcatcgctgagaacagcgatgcgtggaagccccatatgtcaactcttacaacaatgaaaaaccactcaatcaatacttttatagaatacaaaaggctaacaatggggcttgtgacgctagcaatgcagcacataccactatcatatgctgaacctgaagagttcactgaagaagagttggcttccttcaagaaatcagttgaagattcacataaaagatttggcatggaagcaccaaaatggaaaaccgcataagcattgttgtagatgcagcggctggaccattagaacaatactttgcgaaggctcttgcaaactacaaaaacagaggcaccgtttcagcttatcttggtaagattggtgggtttgagagaaaccatcacgccgtcttatcgggaatttacaagtcgcacatcaggatccctggagtagatgatccttggttaagaacaacgccaatacatcgtagagttagcgataactttttgatatttgcggtacacaacacatatccaattcatatccagatcattgctatcattaaacctgatggtcatgagaaggtaaaaaaactattgccagccatcattgatataactgaaaaaagattccaatctctaaatgagagggagcttaactcgttgatttcatacaaataaaatatcaactaagggggttggtgtgtatacaacagttatcgcgatagctatcgcactcattgtggttcagtaccaactggcatctttaaaacaaaagatatctgacctcaagactgagaacgaagcacttaaaaactcaataaaagatgagaagaacaaactatcattcactatatctgatattgagcaatccattgaaattattgagaataatattaacagattaaaaaaagaagatattcatgaaatcaatgacaatatcaaggatttgaaatcttggcttaggaatgtaggacaaatcgccacatcaacacgagataagctcaatacatccatggatgattaattactcctgtgccattccgcttagcgacgctacaatgccagccctcgctaagcgattgaactcttcgtttccaactgcatcgcgtattgcttttacggcggctttatttgccataaatctgcgttccgccgccgctaatgcttctttacttccgccagctcttactgctttcgtggcttcctgaactgctttctctatcgcataccgaccactacgtgtggtggcaattttagatacagcaccttttagcccggcgccaactaaagcacctgcggcagcgcctgcaatgccccctcctgctccaccaacaatggcacctgatgttgaattggcaattgcatttaacactgttgatgtgacgttggataaaccggcatccagatcgcgtagtacattggcagttctccctgttctttcaatatactgctgaggtttcactgctgctcttgcaagagtgccatatgcatctgcaattcttccaagctctgaggaatatcggctaatggcttttacattttgtggagtgagtatctctgcgatatggttaattcctgctgcatcagctttaccaccacgtacaccatgcgagatagcatcttgcaacattgatgatatagcaggaacacgctctgattctggcagcgcgcggatcatagaatggaatccagcaggaccattaagacctttagctgacgatgattgaagggattttactccattcgtaatcagtgcatctgttgccaaatcacgcccgaaaacagactctgcactctcttgtgctgataacctcgctttagacagatcattagctttttgccagtcatcaagaaatccgccgttttccgccattgtgcgcatatcatcagtaattgcccggcgtatttcccctgctctccttgccgcatttgcctctccgctacgcttatatttttgctccgcatcagcaaatttcgctctccatgctttcatgccgtcaaatgttactccaccttgattgtttgcctgaacaaactgtt

SEQ ID NO: 1505 - DNA, 255 bp, Escherichia coli
atgtctgatcgtaagtacaaaaaccctcaagtgaatctgaggcttcctgtagagataaaggaacgtcttattgaactggctgaggctaattctcgttcattaaatgctgagatggtcgctgcacttgaagcatggaccgaaaaaaataaacacattcaagcactagaccttgcaactatagcatcacgattgatagatcttgaacatgatgttgagaagttgaaatgcatgtatggcaacaataaagacgaaagt

SEQ ID NO: 1506 - protein, 85 aa, Escherichia coli
MSDRKYKNPQVNLRLPVEIKERLIELAEANSRSLNAEMVAALEAWTEKNKHIQALDLATIASRLIDLEHDVEKLKCMYGNNKDES

SEQ ID NO: 1507 - DNA, 246 bp, Escherichia coli
atggctagagatgatccgcactttaacttccgtatgcctttggaagtaagagaaaaattgaaattaagagccgaggctaacggaaggtcaatgaactctgagttattacaaatcgttcaggatgcgctatcaaaaccatcaccgattgcaggttaccgtgacgaagcagaacgtatggctgatcagcaagcagaaattgttaagaagatggtgtttgaaaccctgaaaaaaatgtacgagaccaga

SEQ ID NO: 1508 - protein, 82 aa, Escherichia coli
MARDDPHFNFRMPLEVREKLKLRAEANGRSMNSELLQIVQDALSKPSPIAGYRDEAERMADQQAEIVKKMVFETLKKMYETR

SEQ ID NO: 1509 - DNA, 579 bp, Escherichia coli
atggccatcctgaatcaagagccaggaaaaattgaaaacgttttttctgacatatcaacatctatcgagcgttcaatttcagactttgatcgcagtcatagcggctctttgtctaaaaaacaggcttctgaagctcttagcaagatctactgcgttatgtcacctgtagaggaagtttgcaaaaagtacattacattcattgacatattaagtaatggtacagaagaagatatttcctcacttaatattcaacatgacgatgtagatatgttgaacgatcagatatctaagcttgattatggtatcgcgaaactgttgtataccttcttcatcgctgagaacagcgatgcgtggaagccccatatgtcaactcttacaacaatgaaaaaccactcaatcaatacttttatagaatacaaaaggctaacaatggggcttgtgacgctagcaatgcagcacataccactatcatatgctgaacctgaagagttcactgaagaagagttggcttccttcaagaaatcagttgaagattcacataaaagatttggcatggaagcaccaaaatggaaaaccgca

SEQ ID NO: 1510 - protein, 193 aa, Escherichia coli
MAILNQEPGKIENVFSDISTSIERSISDFDRSHSGSLSKKQASEALSKIYCVMSPVEEVCKKYITFIDILSNGTEEDISSLNIQHDDVDMLNDQISKLDYGIAKLLYTFFIAENSDAWKPHMSTLTTMKNHSINTFIEYKRLTMGLVTLAMQHIPLSYAEPEEFTEEELASFKKSVEDSHKRFGMEAPKWKTA

SEQ ID NO: 1511 - DNA, 417 bp, Escherichia coli
atggaaaaccgcataagcattgttgtagatgcagcggctggaccattagaacaatactttgcgaaggctcttgcaaactacaaaaacagaggcaccgtttcagcttatcttggtaagattggtgggtttgagagaaaccatcacgccgtcttatcgggaatttacaagtcgcacatcaggatccctggagtagatgatccttggttaagaacaacgccaatacatcgtagagttagcgataactttttgatatttgcggtacacaacacatatccaattcatatccagatcattgctatcattaaacctgatggtcatgagaaggtaaaaaaactattgccagccatcattgatataactgaaaaaagattccaatctctaaatgagagggagcttaactcgttgatttcatacaaa

SEQ ID NO: 1512 - protein, 139 aa, Escherichia coli
MENRISIVVDAAAGPLEQYFAKALANYKNRGTVSAYLGKIGGFERNHHAVLSGIYKSHIRIPGVDDPWLRTTPIHRRVSDNFLIFAVHNTYPIHIQIIAIIKPDGHEKVKKLLPAIIDITEKRFQSLNERELNSLISYK

SEQ ID NO: 1513 - DNA, 321 bp, Escherichia coli
gtgtatacaacagttatcgcgatagctatcgcactcattgtggttcagtaccaactggcatctttaaaacaaaagatatctgacctcaagactgagaacgaagcacttaaaaactcaataaaagatgagaagaacaaactatcattcactatatctgatattgagcaatccattgaaattattgagaataatattaacagattaaaaaaagaagatattcatgaaatcaatgacaatatcaaggatttgaaatcttggcttaggaatgtaggacaaatcgccacatcaacacgagataagctcaatacatccatggatgat

SEQ ID NO: 1514 - protein, 107 aa, Escherichia coli
VYTTVIAIAIALIVVQYQLASLKQKISDLKTENEALKNSIKDEKNKLSFTISDIEQSIEIIENNINRLKKEDIHEINDNIKDLKSWLRNVGQIATSTRDKLNTSMDD

SEQ ID NO: 1515 - DNA, 966 bp, Escherichia coli
atgaaagcatggagagcgaaatttgctgatgcggagcaaaaatataagcgtagcggagaggcaaatgcggcaaggagagcaggggaaatacgccgggcaattactgatgatatgcgcacaatggcggaaaacggcggatttcttgatgactggcaaaaagctaatgatctgtctaaagcgaggttatcagcacaagagagtgcagagtctgttttcgggcgtgatttggcaacagatgcactgattacgaatggagtaaaatcccttcaatcatcgtcagctaaaggtcttaatggtcctgctggattccattctatgatccgcgcgctgccagaatcagagcgtgttcctgctatatcatcaatgttgcaagatgctatctcgcatggtgtacgtggtggtaaagctgatgcagcaggaattaaccatatcgcagagatactcactccacaaaatgtaaaagccattagccgatattcctcagagcttggaagaattgcagatgcatatggcactcttgcaagagcagcagtgaaacctcagcagtatattgaaagaacagggagaactgccaatgtactacgcgatctggatgccggtttatccaacgtcacatcaacagtgttaaatgcaattgccaattcaacatcaggtgccattgttggtggagcaggagggggcattgcaggcgctgccgcaggtgctttagttggcgccgggctaaaaggtgctgtatctaaaattgccaccacacgtagtggtcggtatgcgatagagaaagcagttcaggaagccacgaaagcagtaagagctggcggaagtaaagaagcattagcggcggcggaacgcagatttatggcaaataaagccgccgtaaaagcaatacgcgatgcagttggaaacgaagagttcaatcgcttagcgagggctggcattgtagcgtcgctaagcggaatggcacaggag

SEQ ID NO: 1516 - protein, 322 aa, Escherichia coli
MKAWRAKFADAEQKYKRSGEANAARRAGEIRRAITDDMRTMAENGGFLDDWQKANDLSKARLSAQESAESVFGRDLATDALITNGVKSLQSSSAKGLNGPAGFHSMIRALPESERVPAISSMLQDAISHGVRGGKADAAGINHIAEILTPQNVKAISRYSSELGRIADAYGTLARAAVKPQQYIERTGRTANVLRDLDAGLSNVTSTVLNAIANSTSGAIVGGAGGGIAGAAAGALVGAGLKGAVSKIATTRSGRYAIEKAVQEATKAVRAGGSKEALAAAERRFMANKAAVKAIRDAVGNEEFNRLARAGIVASLSGMAQE

SEQ ID NO: 1517 - DNA, 2051 bp, Escherichia coli
  misc_feature (1687)..(1687): unknown
  misc_feature (1690)..(1690): unknown
  misc_feature (1692)..(1692): unknown
  misc_feature (1695)..(1695): unknown
ttactcagattgagtattaagggggctatagatgaacgtatactgcgatgatggttcaacaacaatcaagttggcatggaatgataatgggaaaatctgtaagtcgttgtcgcaaaactcatttcgtcatggatggaaggttgacgggttaggaattcgccagacatttaactatgaactggatggtaaaaaatacacgtatgatgaagttagcaaccaatctattcttacgactcatattgagtatcaatatacggatgttaacctgttagctgtgcatcacgctttactgaatagtggattagcgcctcagcctgtatcattgactgtgactttgcctatcagtgagttctatacgaaagagtgtcaaaaaaatgaactcaacattcagcgtaaaattgagaatttaatgaggccgattcgtcttaataaaggcgatgttttcaccattgaacacgttgatgtgatgcctgaatcattgccagctgtgttttctcgtctggtcgtggataaagttggtcagttcgaaaaatcgctggtagttgatattggcggcactacgcttgatgttggtgttatcgttggtcaatttgactctgtaagtgccattcatggtaattctggcattggtgtgtcttcagttacgaaagctgcaatgagtgcattgcgcatggcatccagtgataccagtttcctcgttgcagatgaattgattaaacgtcgtaatgacccggactttgttcggcaggttataaatgacgaaacaaaaactgatctggtccttaataccattgagggggctattgccagtttgggggagcaagtagtcaatgagctcggtgatttccatcatgtgaatcgtgtttatgttgtcggtggtggggccccgttgatctatgattcgataaaaacggcatggcaccatcttgggcaaaaagtagtgatgatggagtcgccacagacagcactggttgaagctatcgcggctttcaaagaggagtaatattgtggacgatgaacggaaaaggaaaaaatacacactttatctgcatccggaaaaagctgcagactttcaaactttggaagcgatagagtccgttccgcgttctgagcgtggtgagctgttccggaatgcatttatttctggaatggcgttacaccaacttgatcctcgcctgcctgtattgctgacagccattttgagcgaggagttttcagcagatcaggttgtaaccttactcagtcagacgactggatggaagccttctcaggccgatatcagaactgtgttgactgaactcggtgcttcgcaatctgttgaaaaaattcctccttttactgctgattcggtgcaggagcgtaatgaataatgtgcgtcttaaaatgaaacaattattttgataaatcagaatcaacccatggggatctcagtccattgtgttgtatacgaaggcgatagcatttcccgtttcatttgccattcaggggcggttcctcgccccgcaaaccacactttcccttttcccgactggttcagttcatcgagtgttttcattaacttttcactgtttttacggggctggatttcatcaaataatcccggctgcgctatacccgatggtgtgaaatcagccatgcatgactcctgccttcatatagcggtacccttcaccgcctggccctgttntantnttnttatatggtggcgtttttttattcttttgtcttatttaaaggtatttctcttttatatctgggttcttctttatattctctttgtatataagcatgtttggttctttcttattttgcttcctcttctacttaaatatattttattttctatctttagtaattttttttctgtttatgcttcctctcacgtatacattcatcttacctcctttgacttaattttgtctgttccttattattatttttcgcgttaaccctttcggttttttttttcagatataccctagttttttcctctctggttcttttgataaccatctatttcctgtcattttattatcacgtgagtcttttct

SEQ ID NO: 1518 - DNA, 969 bp, Escherichia coli
atgaacgtatactgcgatgatggttcaacaacaatcaagttggcatggaatgataatgggaaaatctgtaagtcgttgtcgcaaaactcatttcgtcatggatggaaggttgacgggttaggaattcgccagacatttaactatgaactggatggtaaaaaatacacgtatgatgaagttagcaaccaatctattcttacgactcatattgagtatcaatatacggatgttaacctgttagctgtgcatcacgctttactgaatagtggattagcgcctcagcctgtatcattgactgtgactttgcctatcagtgagttctatacgaaagagtgtcaaaaaaatgaactcaacattcagcgtaaaattgagaatttaatgaggccgattcgtcttaataaaggcgatgttttcaccattgaacacgttgatgtgatgcctgaatcattgccagctgtgttttctcgtctggtcgtggataaagttggtcagttcgaaaaatcgctggtagttgatattggcggcactacgcttgatgttggtgttatcgttggtcaatttgactctgtaagtgccattcatggtaattctggcattggtgtgtcttcagttacgaaagctgcaatgagtgcattgcgcatggcatccagtgataccagtttcctcgttgcagatgaattgattaaacgtcgtaatgacccggactttgttcggcaggttataaatgacgaaacaaaaactgatctggtccttaataccattgagggggctattgccagtttgggggagcaagtagtcaatgagctcggtgatttccatcatgtgaatcgtgtttatgttgtcggtggtggggccccgttgatctatgattcgataaaaacggcatggcaccatcttgggcaaaaagtagtgatgatggagtcgccacagacagcactggttgaagctatcgcggctttcaaagaggag

SEQ ID NO: 1519 - protein, 323 aa, Escherichia coli
MNVYCDDGSTTIKLAWNDNGKICKSLSQNSFRHGWKVDGLGIRQTFNYELDGKKYTYDEVSNQSILTTHIEYQYTDVNLLAVHHALLNSGLAPQPVSLTVTLPISEFYTKECQKNELNIQRKIENLMRPIRLNKGDVFTIEHVDVMPESLPAVFSRLVVDKVGQFEKSLVVDIGGTTLDVGVIVGQFDSVSAIHGNSGIGVSSVTKAAMSALRMASSDTSFLVADELIKRRNDPDFVRQVINDETKTDLVLNTIEGAIASLGEQVVNELGDFHHVNRVYVVGGGAPLIYDSIKTAWHHLGQKVVMMESPQTALVEAIAAFKEE

SEQ ID NO: 1520 - DNA, 219 bp, Escherichia coli
atggcgttacaccaacttgatcctcgcctgcctgtattgctgacagccattttgagcgaggagttttcagcagatcaggttgtaaccttactcagtcagacgactggatggaagccttctcaggccgatatcagaactgtgttgactgaactcggtgcttcgcaatctgttgaaaaaattcctccttttactgctgattcggtgcaggagcgtaatgaa

SEQ ID NO: 1521 - protein, 73 aa, Escherichia coli
MALHQLDPRLPVLLTAILSEEFSADQVVTLLSQTTGWKPSQADIRTVLTELGASQSVEKIPPFTADSVQERNE

SEQ ID NO: 1522 - DNA, 522 bp, Escherichia coli
atggggatctcagtccattgtgttgtatacgaaggcgatagcatttcccgtttcatttgccattcaggggcggttcctcgccccgcaaaccacactttcccttttcccgactggttcagttcatcgagtgttttcattaacttttcactgtttttacggggctggatttcatcaaataatcccggctgcgctatacccgatggtgtgaaatcagccatgcatgactcctgccttcatatagcggtacttcaccgcctggccctgtttatttttatatggtggcgtttttttattcttttgtcttatttaaaggtatttctcttttatatctgggttcttctttatattctctttgtatataagcatgtttggttctttcttattttgcttcctcttctacttaaatatattttattttctatctttagtaattttttttctgtttatgcttcctctcacgtatacattcatcttacctcctttgacttaattttgtctgttccttattattatttttcgcgt

SEQ ID NO: 1523 - protein, 174 aa, Escherichia coli
MGISVHCVVYEGDSISRFICHSGAVPRPANHTFPFPDWFSSSSVFINFSLFLRGWISSNNPGCAIPDGVKSAMHDSCLHIAVLHRLALFIFIWWRFFILLSYLKVFLFYIWVLLYILFVYKHVWFFLILLPLLLKYILFSIFSNFFSVYASSHVYIHLTSFDLILSVPYYYFSR

SEQ ID NO: 1524 - DNA, 364 bp, Escherichia coli
gggacagttggctttttctacaagaagaaattcacctaaacaagcgttggggtaaaaatagcctggtacatcaaatgatgatgccatcacgcatacctcaaacctgagcacgataaagcttaccgagcaaaatacatcacaattcccgtaatcaaataaacaaagtaatggcaataaacattgctgataactagcctgtactcagttttggaatggacctcccttgagcatttttcctgatatgttgtctggtttcaaatattcctcataccccccaaatgttgctctatagcatttaatctattagtagaaacggctatagctcaattgtgtttttccagattgagcatatcccttttcccat

SEQ ID NO: 1525 - DNA, 3634 bp, Escherichia coli
  misc_feature (2635)..(2635): unknown
tgctcgaccaggcgaaagtgctggcccgttatctgaacgaacagccgcagggctggctttcggcgcaccggctgatgaaaaccctgcgctgggacacggtgcatgaactgccgccggatgtggacggcaaaacccggctggccccgccgcgcaccgagtcacgcaaccagcttaagcggctgtatgcccagcagaactggacggaactgctggagcaggccgacctgatgttcagcaccggcgtcagccatttctggctggatatccagtggtatctgcatcaggcgctgactaaggcgggcgtaccgtgggacaggtggacagctgttatccgtcaggacctggcgttactgctggaacgcctgccagggctggaaaatctggcatggaacgacggcacgccgttcgccgatgaggtgacgcgcaactggatagcgcagcaggtcatgatgcgggaagacggcgcatggcttgcggggaaagccgctgtaccgacagacgacgccacaaatgacgtactggcgctggagccggaagcactggcgatggcagacagtcagggcgtggaagcggcgctgggctggatacagacccgtccgggcatcaccacggcacgacagcgcctgttattgcgactgctgatggcgcgggtggcggaacagtacggtaaaaacgagatggcgctcctgctgctggaagaactggataccgccgcacagggaataacgctgacgcagtgggagccagaactgctgtttgaagtaaaagcccggcaactgaaactgctgcgtctgcgggcgcaccgctatgcggataaagccctgctgaaccgaaaaatggaaatcctgctgggaacgctggtggcaatcgatccggcacgggcagcggtactgtgtgatacgcaacataaggactgatggcaatgggaacaggctactttctggtcaggggggacaaaaccacctgcggcgggaagattattgaaggcgcggacgaccatacgatcatgggtatcccacaggcacgggatatggatcgggtcacctgcggcagatatccgggaatgtttattattgtgggcggcgtgccggaaacggatattcacggcaggctgatggcgggatctctggacagccagagcagttgcccgtgcaaggcgcggtttattgcgtcaatgatggatgatacctatgaaacggatgacgggggaagcgagccggaacaacatgcgcagtcggcgaggaaaaatctgacttccggtaatccagataaaaaatacagtcatcagataaaacttcaacatggcgaaaataatgttagtgtacaggacataccttatgtctttatcctaaataataacatgtctctcagtggcaagactaatcaggatggcgagactgagagaatatatacagatactgctcaaaaggtaattgcacttacaggaaaactggctgattcctggctgaaaagagggaaaaattttggttcattaaaagaaattgacaatagaaagatcgaattaacaactgaagagaatgaacctgtaaaatatgtcaactggattaatgggcgtgattatattgtgattgtggcggccagaacagccgtaacaaactggataggaatggaggactcaaaaggaaatcagtatcgatttataaattgtggattagaacaattacaacagtttcctccagccagtaaacaggattccagttcgcagcgaattatggtggttttttcgcttgggtatacgcaaaaagatattgatagaattaatgattatactaaagcgcacgatggaagaattatctatgtcaagaataaggatgaattagtttcattcctgaatcaacgcaaagaaaaaggaagagtgattaaggaactggttattctgtgccacggtgttattaaaacagcttcatatcattatcatcatgaagacaaggatattgaaaaaaatggaatgtttaaacatgaagatattgcagcagttcacgagtcagtttttgattatgatgcccatgtgacaacatatgcctgtcgggccggtatctcagatggtgataaagatttttccgggaaggatgatgcagggcaaaaggacagcccggcacagaaaatggctgataactgggatgtcatggttaaagcgtttgagatgagatcggactacagtctggcttatgggacaggcaaggaaattaaagaagctcaggaatatggtagtgtggtagaaaaatataaaaaagatatagatatgtataataaagaaaaagcaaaggggaatactgaagtttcccctccagtgaaaccagagggatatgatgagaaatcaaaacgccatgcagatgttactaccagagacaaaaatgaaaagtctggcggaggaccaatagctcctaatggtgcatggcatatgccaagaacaggggattcgccgaaagggctgaaaagcgggttacaggattatcagcctgaggagtgggttcaataatgttcttaaaaagaaaatggtattacgcagtgcgacatctgtcgtcattactttgtgtggtggaggatattatatgtacaggcaagaatatcagatggttgtcactgtaccaactgctgacgcgaacgatcccanctggccaaataaaaggatacagtttgataccagcgaatggctacagcaacttcaatatattaaaatagatgatcattatatattgaatactcaatatactccaattgctaatttggatgactttggtattacattaaaattacagaacgcattaaatgggtcggataaaagacttcctgcactatatggccttgctgagatggatgctcagaaatttaaagacctgatgcgcggtaaaattaaatgtgaatatctgaggacgacatttgatgcggaaacattaaagcctgtcaatgattatttccttatttcttttacttataaagataagtggtatgaatttgagacagaaagaaaaatatctaaaacaagtgatgatgggtattttttgtgggcatttgataatactgtccacgaagcaggctattggcataacacagatccggctgcgtattcctatagagattaccagaatggtaaggctgtgaaataagtgtcaggatactcaggcggcggtactgtgcgatacgcagcttagtttggattactgattgtattgtggcctatattgaagcagctcagcaggaatttgttgagaaagccagagagactgcagatgatatctgggacttgggaactatgtgggcaaaaaatgtgctaattaaaggaagggaggtactggagcatgaggtgaagtaatatctaagagaaaatcttgataatataattaagtggggactaaattagagatgaatattcaggcaataaaagaaatggtaaatttaatttgtagttttttatttatattctttctgtcctcggcttttgtttcttttgggtgttatgctatttatgaattgtttttatggaatgatattattgtatatagctggggatatatattaattgtcttgtaacctttcacattatatgtaatgtcgttcagacttttgttttttgctattagtgggcgacagattgtctaaagtaacaatggtg

SEQ ID NO: 1526 - DNA, 912 bp, Escherichia coli
ctcgaccaggcgaaagtgctggcccgttatctgaacgaacagccgcagggctggctttcggcgcaccggctgatgaaaaccctgcgctgggacacggtgcatgaactgccgccggatgtggacggcaaaacccggctggccccgccgcgcaccgagtcacgcaaccagcttaagcggctgtatgcccagcagaactggacggaactgctggagcaggccgacctgatgttcagcaccggcgtcagccatttctggctggatatccagtggtatctgcatcaggcgctgactaaggcgggcgtaccgtgggacaggtggacagctgttatccgtcaggacctggcgttactgctggaacgcctgccagggctggaaaatctggcatggaacgacggcacgccgttcgccgatgaggtgacgcgcaactggatagcgcagcaggtcatgatgcgggaagacggcgcatggcttgcggggaaagccgctgtaccgacagacgacgccacaaatgacgtactggcgctggagccggaagcactggcgatggcagacagtcagggcgtggaagcggcgctgggctggatacagacccgtccgggcatcaccacggcacgacagcgcctgttattgcgactgctgatggcgcgggtggcggaacagtacggtaaaaacgagatggcgctcctgctgctggaagaactggataccgccgcacagggaataacgctgacgcagtgggagccagaactgctgtttgaagtaaaagcccggcaactgaaactgctgcgtctgcgggcgcaccgctatgcggataaagccctgctgaaccgaaaaatggaaatcctgctgggaacgctggtggcaatcgatccggcacgggcagcggtactgtgtgatacgcaacataaggac

SEQ ID NO: 1527 - protein, 304 aa, Escherichia coli
LDQAKVLARYLNEQPQGWLSAHRLMKTLRWDTVHELPPDVDGKTRLAPPRTESRNQLKRLYAQQNWTELLEQADLMFSTGVSHFWLDIQWYLHQALTKAGVPWDRWTAVIRQDLALLLERLPGLENLAWNDGTPFADEVTRNWIAQQVMMREDGAWLAGKAAVPTDDATNDVLALEPEALAMADSQGVEAALGWIQTRPGITTARQRLLLRLLMARVAEQYGKNEMALLLLEELDTAAQGITLTQWEPELLFEVKARQLKLLRLRAHRYADKALLNRKMEILLGTLVAIDPARAAVLCDTQHKD

SEQ ID NO: 1528 - DNA, 1581 bp, Escherichia coli
atggcaatgggaacaggctactttctggtcaggggggacaaaaccacctgcggcgggaagattattgaaggcgcggacgaccatacgatcatgggtatcccacaggcacgggatatggatcgggtcacctgcggcagatatccgggaatgtttattattgtgggcggcgtgccggaaacggatattcacggcaggctgatggcgggatctctggacagccagagcagttgcccgtgcaaggcgcggtttattgcgtcaatgatggatgatacctatgaaacggatgacgggggaagcgagccggaacaacatgcgcagtcggcgaggaaaaatctgacttccggtaatccagataaaaaatacagtcatcagataaaacttcaacatggcgaaaataatgttagtgtacaggacataccttatgtctttatcctaaataataacatgtctctcagtggcaagactaatcaggatggcgagactgagagaatatatacagatactgctcaaaaggtaattgcacttacaggaaaactggctgattcctggctgaaaagagggaaaaattttggttcattaaaagaaattgacaatagaaagatcgaattaacaactgaagagaatgaacctgtaaaatatgtcaactggattaatgggcgtgattatattgtgattgtggcggccagaacagccgtaacaaactggataggaatggaggactcaaaaggaaatcagtatcgatttataaattgtggattagaacaattacaacagtttcctccagccagtaaacaggattccagttcgcagcgaattatggtggttttttcgcttgggtatacgcaaaaagatattgatagaattaatgattatactaaagcgcacgatggaagaattatctatgtcaagaataaggatgaattagtttcattcctgaatcaacgcaaagaaaaaggaagagtgattaaggaactggttattctgtgccacggtgttattaaaacagcttcatatcattatcatcatgaagacaaggatattgaaaaaaatggaatgtttaaacatgaagatattgcagcagttcacgagtcagtttttgattatgatgcccatgtgacaacatatgcctgtcgggccggtatctcagatggtgataaagatttttccgggaaggatgatgcagggcaaaaggacagcccggcacagaaaatggctgataactgggatgtcatggttaaagcgtttgagatgagatcggactacagtctggcttatgggacaggcaaggaaattaaagaagctcaggaatatggtagtgtggtagaaaaatataaaaaagatatagatatgtataataaagaaaaagcaaaggggaatactgaagtttcccctccagtgaaaccagagggatatgatgagaaatcaaaacgccatgcagatgttactaccagagacaaaaatgaaaagtctggcggaggaccaatagctcctaatggtgcatggcatatgccaagaacaggggattcgccgaaagggctgaaaagcgggttacaggattatcagcctgaggagtgggttcaa

SEQ ID NO: 1529 - protein, 527 aa, Escherichia coli
MAMGTGYFLVRGDKTTCGGKIIEGADDHTIMGIPQARDMDRVTCGRYPGMFIIVGGVPETDIHGRLMAGSLDSQSSCPCKARFIASMMDDTYETDDGGSEPEQHAQSARKNLTSGNPDKKYSHQIKLQHGENNVSVQDIPYVFILNNNMSLSGKTNQDGETERIYTDTAQKVIALTGKLADSWLKRGKNFGSLKEIDNRKIELTTEENEPVKYVNWINGRDYIVIVAARTAVTNWIGMEDSKGNQYRFINCGLEQLQQFPPASKQDSSSQRIMVVFSLGYTQKDIDRINDYTKAHDGRIIYVKNKDELVSFLNQRKEKGRVIKELVILCHGVIKTASYHYHHEDKDIEKNGMFKHEDIAAVHESVFDYDAHVTTYACRAGISDGDKDFSGKDDAGQKDSPAQKMADNWDVMVKAFEMRSDYSLAYGTGKEIKEAQEYGSVVEKYKKDIDMYNKEKAKGNTEVSPPVKPEGYDEKSKRHADVTTRDKNEKSGGGPIAPNGAWHMPRTGDSPKGLKSGLQDYQPEEWVQ

SEQ ID NO: 1530 - DNA, 606 bp, Escherichia coli
atggtattacgcagtgcgacatctgtcgtcattactttgtgtggtggaggatattatatgtacaggcaagaatatcagatggttgtcactgtaccaactgctgacgcgaacgatccctggccaaataaaaggatacagtttgataccagcgaatggctacagcaacttcaatatattaaaatagatgatcattatatattgaatactcaatatactccaattgctaatttggatgactttggtattacattaaaattacagaacgcattaaatgggtcggataaaagacttcctgcactatatggccttgctgagatggatgctcagaaatttaaagacctgatgcgcggtaaaattaaatgtgaatatctgaggacgacatttgatgcggaaacattaaagcctgtcaatgattatttccttatttcttttacttataaagataagtggtatgaatttgagacagaaagaaaaatatctaaaacaagtgatgatgggtattttttgtgggcatttgataatactgtccacgaagcaggctattggcataacacagatccggctgcgtattcctatagagattaccagaatggtaaggctgtgaaa

SEQ ID NO: 1531 - protein, 202 aa, Escherichia coli
MVLRSATSVVITLCGGGYYMYRQEYQMVVTVPTADANDPWPNKRIQFDTSEWLQQLQYIKIDDHYILNTQYTPIANLDDFGITLKLQNALNGSDKRLPALYGLAEMDAQKFKDLMRGKIKCEYLRTTFDAETLKPVNDYFLISFTYKDKWYEFETERKISKTSDDGYFLWAFDNTVHEAGYWHNTDPAAYSYRDYQNGKAVK

SEQ ID NO: 1532 - DNA, 165 bp, Escherichia coli
atgaatattcaggcaataaaagaaatggtaaatttaatttgtagttttttatttatattctttctgtcctcggcttttgtttcttttgggtgttatgctatttatgaattgtttttatggaatgatattattgtatatagctggggatatatattaattgtcttg

SEQ ID NO: 1533 - protein, 55 aa, Escherichia coli
MNIQAIKEMVNLICSFLFIFFLSSAFVSFGCYAIYELFLWNDIIVYSWGYILIVL

SEQ ID NO: 1534 - DNA, 2286 bp, Escherichia coli
aactctcccgacgtcaacaacactccttcggaggcgacatgtcagacaaagacttaacccagcccccagcaggcgagtttattatgtttgccagcggtgacggaagagtgcgtgttgaatgtcgctttgagtcagacacaatctggttatcccaggcggcaatggctgaactgtacgataaagatgttcgcactattaacgaacatttaatcaatatattttccgaaggtgaacttgttcaaaactcaaccatccggaaattccggatagttcgccaggaaggaaaacgtcaggtttccagagagatagaccattacaacctcgaagccattctcgctgtcggctatcgcgttcgctcgcctcgaggcacgcaattccgccagtgggcaacgcagacgcttcaggaatacctgatcaaaggttttgtgatggacgatgagcggctgaagaatccgcctgtcggttcatcggttgtgcccgactattttgatgagatgcttgaacgcatccgcgatattcgcgccagcgagcgtcgggtatatttgcgggtgcgggagatctttgctttagctgccgactatcagccatcgcttaaagaaaccacgcaattttttcaaaccatccagaataaactgcattttgcctgtaccgggcataccgctgcggaactcatccacaaacgagcagatgccagccagccgcacatgggcttgaccagttataaaggtgaagaggtacgtaagggcgacgtgacggtggcaaaaaattatctcacccaggatgaggtcagcgaacttaatcgcgtggttaatatgtggctggactttgccgaggatcaggcccgtcgtcgtcagcaagtctttttgcgcgactggcaggataagctggatcagttcctgcaatttaacgaccgagaggttctacagggcgctggtaaaatcagcaagaaaatggccgatgaaaaagcgcaggcggagtatgttcagtttgccgaacaacaacggcgcttaaaagaagccgaaggcgagaaggatatcgctggtttgctacagtggaataaagagtcgaaaaagtagcccggaatccccccaaacgccatacgcaaaaccatttgggggtacttatggggttactcatttatcaaattcaaaatataaacattaaatcaataacttaaccatcaaatgcgactcctgtgatcgccaaaatgcctcttcagtgatccccatcctgcttatttctgagcaacctgaccctgctgatgtatctggtagtatgacagagtgattcgtttttcttgccgagtgtacgaaaacgtcttccttgccaccgactatcaaccgtcactcaaaaaaacctctctttttttcaagctatcaagaataagttgcattttatctgcaccggacaccagccatccatatatggcttttacctgctacaaagatgaagaagtgcataaatgtgatgttaaaacaatcaaagaaaaattacatgcgcaataatttcactataacattataatccatggtgaaaataacactgcacaaggattgtcatcatcaaactcatcggaactattttttctgtcgtcattggtgtaatactgattgtaagtatcctttcaggagattatttttgccgtgtggggcatggaacttgtaaagcagccaaaagcgctaggcatttaattgaaagtaaagagaaaaacagaagtagtcgcgtcaaagtctttagcacgcatattaatttgagtcatccagcggcatcctggctagcaactcaaacttgcgctaacaatatattcaatctgcttcaaaacaataatgccatttatttattcaaaaacgataataaaattgaactgcgaatggggtatgattcttttttctctattgaaacgattgataaaattaacaaagaaaacatcaaagaaataaaactaaaaaatgatacaacatatgtttctcttcctaatccaaccattttaataaccaacgacatcaacacctgaacgacagttttctatttctgttctggatgatgataacaaagaaaatctacctaccgataccgcaccttgttttacaattggtattcctgatgaatatactaaagccatagagttattgaacattaaataattaaatttcatattgagtttttttaaacaccatatgaataattgttatatgtcattatttcctccattcactaaaactgattgattactctactccctcaccgtaatcggtagggggatccttaacgtatattgatgaaaag

SEQ ID NO: 1535 - DNA, 1035 bp, Escherichia coli
atgtcagacaaagacttaacccagcccccagcaggcgagtttattatgtttgccagcggtgacggaagagtgcgtgttgaatgtcgctttgagtcagacacaatctggttatcccaggcggcaatggctgaactgtacgataaagatgttcgcactattaacgaacatttaatcaatatattttccgaaggtgaacttgttcaaaactcaaccatccggaaattccggatagttcgccaggaaggaaaacgtcaggtttccagagagatagaccattacaacctcgaagccattctcgctgtcggctatcgcgttcgctcgcctcgaggcacgcaattccgccagtgggcaacgcagacgcttcaggaatacctgatcaaaggttttgtgatggacgatgagcggctgaagaatccgcctgtcggttcatcggttgtgcccgactattttgatgagatgcttgaacgcatccgcgatattcgcgccagcgagcgtcgggtatatttgcgggtgcgggagatctttgctttagctgccgactatcagccatcgcttaaagaaaccacgcaattttttcaaaccatccagaataaactgcattttgcctgtaccgggcataccgctgcggaactcatccacaaacgagcagatgccagccagccgcacatgggcttgaccagttataaaggtgaagaggtacgtaagggcgacgtgacggtggcaaaaaattatctcacccaggatgaggtcagcgaacttaatcgcgtggttaatatgtggctggactttgccgaggatcaggcccgtcgtcgtcagcaagtctttttgcgcgactggcaggataagctggatcagttcctgcaatttaacgaccgagaggttctacagggcgctggtaaaatcagcaagaaaatggccgatgaaaaagcgcaggcggagtatgttcagtttgccgaacaacaacggcgcttaaaagaagccgaaggcgagaaggatatcgctggtttgctacagtggaataaagagtcgaaaaag

SEQ ID NO: 1536 - protein, 345 aa, Escherichia coli
MSDKDLTQPPAGEFIMFASGDGRVRVECRFESDTIWLSQAAMAELYDKDVRTINEHLINIFSEGELVQNSTIRKFRIVRQEGKRQVSREIDHYNLEAILAVGYRVRSPRGTQFRQWATQTLQEYLIKGFVMDDERLKNPPVGSSVVPDYFDEMLERIRDIRASERRVYLRVREIFALAADYQPSLKETTQFFQTIQNKLHFACTGHTAAELIHKRADASQPHMGLTSYKGEEVRKGDVTVAKNYLTQDEVSELNRVVNMWLDFAEDQARRRQQVFLRDWQDKLDQFLQFNDREVLQGAGKISKKMADEKAQAEYVQFAEQQRRLKEAEGEKDIAGLLQWNKESKK

SEQ ID NO: 1537 - DNA, 219 bp, Escherichia coli
gtgattcgtttttcttgccgagtgtacgaaaacgtcttccttgccaccgactatcaaccgtcactcaaaaaaacctctctttttttcaagctatcaagaataagttgcattttatctgcaccggacaccagccatccatatatggcttttacctgctacaaagatgaagaagtgcataaatgtgatgttaaaacaatcaaagaaaaattacatgcgcaa

SEQ ID NO: 1538 - protein, 73 aa, Escherichia coli
VIRFSCRVYENVFLATDYQPSLKKTSLFFKLSRISCILSAPDTSHPYMAFTCYKDEEVHKCDVKTIKEKLHAQ

SEQ ID NO: 1539 - DNA, 366 bp, Escherichia coli
gtggggcatggaacttgtaaagcagccaaaagcgctaggcatttaattgaaagtaaagagaaaaacagaagtagtcgcgtcaaagtctttagcacgcatattaatttgagtcatccagcggcatcctggctagcaactcaaacttgcgctaacaatatattcaatctgcttcaaaacaataatgccatttatttattcaaaaacgataataaaattgaactgcgaatggggtatgattcttttttctctattgaaacgattgataaaattaacaaagaaaacatcaaagaaataaaactaaaaaatgatacaacatatgtttctcttcctaatccaaccattttaataaccaacgacatcaacacc

SEQ ID NO: 1540 - protein, 122 aa, Escherichia coli
VGHGTCKAAKSARHLIESKEKNRSSRVKVFSTHINLSHPAASWLATQTCANNIFNLLQNNNAIYLFKNDNKIELRMGYDSFFSIETIDKINKENIKEIKLKNDTTYVSLPNPTILITNDINT

SEQ ID NO: 1541 - DNA, 9416 bp, Escherichia coli
tttacaataaatagctgcactgaccttatgcgatagttcagcatatacactcttcctctcagatcttcaggaatacccgggaacagtcagttatgccatcggggagaaaaacaggcagcgaatcattacttcataccgaaaactgcctccccggtgactcaggcccgggttcagaactaccagttgacacccacattccaggaaacatagccgccactgaaagtagtacctgcctttaagcagtctgcttggcactatacccgcccacagccgctatggcgttaaatttatcctcactgtacggctcccgcttcatttcctcgtgattctcattaatcagccctgctgactgttcagacgctccgcatgcatctccagcacctctcccggggaaagcagcccccgggtgttacggtttatggccaccgtgttccggatgatattctccctgttctctgcagcgaccgtatctgtatggtcacacgccttaagcacttatgctgtaatccgtccactgatgccactgtacacctcatccgtcagcgggttcagttgcctgatagtggctgcttccgtatcccatgcaccatcactgataccaccgggaccccggattttatccggtccccgcggactgacagggtttgtgacacctgagtcatatctgatgtaaacttcattttcacgggttgtacaggaaaactccccctgtgccattgaattctgatgtgtgcccttcgccacaactcccaccgtcacggcaccagttgcatctgacgccgaccaactgctgagagccatgccgtttccggctttgtcgataacgcatgctgcagttcccagcgatgcgaactggtctggcatgcattcacgaaccaacagcagtggtgctacgtccggatgcaattcgcatgagctccaaccgcggttgtaagttcagcagcccgggcctctgcccccggcacagtcgcataagtattcgataccgtgcgacaccattaccttcaggatacgccacggacccgtcaccctacgaaaacgccggaacaccggcaatcagcaaaggcagcagtgataaaagactgatatatttcctgtcattatttttcatattaatttaactcctgattaaccggtttttattgatatgagaaagtaatagttgcaatagccttcacacttccaggtgtagttgcatcagcaatttttatataattggctcttaaattgatatgtggatttacctctcccctgtaatcggagaagtgccattgactgccatttcctttcacaggggagtcttcaccatagctgatggcagttacatcactgtctttatatagcctgatgccaaatccttttgcagtggattcactgcttaaggtcaatatatctgttctgttcactggctgtgatgcatctgtcaatgtagcataaacatcaattccatccgggcattgtaggtgtatgtcaattttacctccctgtatttctttatacaaagatgtgaactgtgattgatatacggtatttaatggcaccacatagtttttttgccccatggtacatgtctgactctgtacctgaatgcgcccaccatttaacataacaggtgctgtcagtcctttattatttaaacttgtacgttttgcttccaacaaaatagtaccaagctgcctggtgggtattgttatatatccattgggtaatcttcccgttgcgacaaaagcaacaaacaaacgagctccgaagcttgctgtcgcaccgttataagtattggggtttgtattggcacctacagggtcaatatatatacctgagctatttatggggaccagaggcgttgcgggccaatagcccgccatgccaataataatacccagtccggatacaccaatatcatagatatcaaaatcagatgaatcacggctgtttccttgatggaaagtatacgtaatacttccaattttaggcagtgcgggtgtaaactttccacgcatcagagcgatggcaccgccattaaaaacatactggttacttgttcccgccagctctcctatcacccggggataggtatgggcatcagcaggaccaatcacaacacctggcaatgtggatgtattaaccgctatctgcgaaggcacataatcatccggacccgctaccgccagcttagggagtaaaattaaaaacaatggtatgaaaaagattcttttcatgttttttcctgattagggtgctgtatacacagaacaggaacgagctgagattgcatatcatctttattgtgtgcaacatgatatacaaatgaacatctgtctttattatctggtccccatacaacgctgagatgacctttttcagggagtcccctggtaaataccttcccggcctgagcgacatatccggccaactgtccatgttcatccagaacttcagaagccattggagggggattgccagtagacatacgaatatcaaataacagacttcttcctgttttagtgtcaaatttcactaacgtggcgctattagcacgaggaatgatttcctgctccgtcgccgataattcaacattcaaatctaaattggagggatcgatgctaatttgatttttctcatagggtgtaacataaggaacaacaccatttccccaaaaatccagacgactaccagaggcattattgatgacagccccctgagctccttcagcatggataatggcaaaagtatcactcaggtcattactcaatgtcactccataggggtgtgcgaccaccgctcccgacgcaccaaatgacctttgattattattctgagtatcatgcccgactgttgtggttatatttacataaggtgaacgataacccccattcattgcataaccggaaggcccgttttcctggctgtttcctgaaataccataagagaactgattatcctccccgccagtaccactaattgatgtctgaatactatttttctcttctttgctataatttaaaacagtggaaaacaccgggctttgaacacttcctcccagagggagagtaaaatttatataaaatctgtcatcacggcgttgttgctcattatctcttgactgagacaatccaatttgatagccgagttgtttccagaagttgctgtacccaatctggtattcattacgacttcctttatgtccccagtaattataggttgttcctgttaaatacatcccaccccatttttcacctaattcctggttgattgaaatctggaattgattcctgggacgataaaacgctgtactttttacagaaacatcatcaataaacgcgttgtgattagctgatagcgcatccttcagatgataaaaatcttttgatgaataacgataagccgccagagttatatttgtgtttgaggctggaatattgatgctataacttgagtgcagactataacctttacgcgttacaccggaatacctgaatgctgttctggacaatgtaatgtcagatgctatagcacccagaggggtattaaaggccaggccagctaaccccgctgtatatcctgaagctgtggtaagaccactgtttaaagtaatatcattcgtcaggccgtattgataggtgccttgtgctattaaatcattatatgttttattcgcataacgatactttcccactgacatttgccagcgactaaatccgggacgaatgagttgagcaacggccgcaaaaggaaccgtgaacattcgtgtctggccattagactctgttatcttaacgagaaggtcaccagcatatccactgggatataaatcattgatgacaaatggtccggctggcaccgtcgtttcatagaggatatgagcattttgataaatggttactttagcattactgttagctattccccggacagcaggagcatagccacgtaaagagccgggtaacattcgttcatccgatgctaacctgactccccgcaaactgaggctatccattagctcaccattcgtataaaaatcccctaatgtgaattgtgctctcaatggggcaaggtcatgcattatacttgtttctatattctgatatccggcaggatagctattattccagctctcactgccacggtggcgcaaagcccatccccacaaattgaatccagcttttaatcccagataagtctgttcgttactcgtcccggaagagctatactggtaatagttagcatcatagtttataaatgctgcaggaacaccactttgccactgagcaggggaaatatatcctcttggacgtgtattcagcagtgcctgagggatttcgatattcaaccttaaagtcgataagtcaaaattaattctggctgaagaaagccctgttgacgccggaaagcaggaggtgtttcccgacatagtatctttgactaaatcaatcaatgaaagcagctcaggcgtcaggcataacgtcggagcaccggtattggcagtacgtaaatactgcaaatcagccttccccttccatacattattaacataaatatcagaataatacctgccctcaggcacagggttaccatgactaaagcggcggatatcaatagcatttatccctttatccaaatgcaaaaactcagaatcaaactcagcctcttcagcagcaaatgaatggtttgttactgttaaccctaatgcagcaaaaagcagaagagaacaacgacagtaaatcaggcatgacagattattagcgttcattattaccttactccagaacagattctccttgctgatatcctccgtaatcattaacaataacccaggaaactttgctggctggcgcagttctgcctttaagtgcaaatactgttgaagagaaagggggaatcattccaccatgttcaacaggcgttaagtgcttattctggtcaactgcaattttgttgtaggttatgtaataaggtgttggattaactgctttaattcggccttcctcctggtgccaggtcactttcagataagcatcatttggtgttaacttcaggtgagcaggacgaaagaaaaattttatgcgactacgaatagctagttgcaaataattattattccgctgctctgagttatcggagtctttttttgccctgggctttgctggaatatccagaacatttagatagaaaagagattctcggtctttcggtagtgactcgcctgtatatacaattctgactgtttgtcctgatttagagtccatacgaaatattggcggagtaatgataaaaggaacgtggactgactcagggggagctgctgcatctccatcgtctaaccaggactggactaatgccggagattcattgtcattatttaaacgtatgctaatactcttttgagtcgccggataaacaacacgggttcccatgataactacactaccctgaacaactgcagatacagatagagtaaaaaaaaacagcacaaaccttagcatggtatctccagaagaaaacagggcagtatttcctgcccagaaatacaaaagagtaaaaagttttttattcgtaggcaatggtataatggaccgtcgcttttacatcccctgcggtagattgtcctgttgcataatactgggccatataacgcaatgtggcacttccatcagatccgattgtctcagactggacatcttgcccattatccgcttcccccaaaagaatagttgaagttccattactatttagcaactgaatctgtacattatccgctttagttggagtagcagtattttttaaattatgtgtagctaagtcaatgttacttgaaggctcaaagtacgctttaacattctgagcactattcataccagttgcacaaccagttaaacgaatggcaaagggtgtcagccctgacgtagcagcattgtcttttagagatgaagtggcaacagtgggtaaagttactgctaagtctttgtcgcttgtattaactgtgcaggtctgagctacaactttaccggtaaacgtaattgttccgtcataggccatagctgaaccagcaaacacagcagaaacaaatgtagccaatgctataacttttattttcataaaatgaattcctgtttaattccagtattgatcatttgttcagcaatcatccccaacaaaacaatcattttcaaaatgtttttaccgatcgataaccagcgtatgatagattgcacctatcatgattgctaaaacgatcgggaaaaacgatcaaaaaccatatttattgtgttggtaatgacaaaagatatgctttaccctgaaatgagcgacctattcatgaaaatatgtaggtctgtatttgattactatcattgctatatttccactatccaatttatatttcatgattaaaatatacctttttacactattatttatttgttgcagcttgcctggctttatcttattccgactattttatggtagatacagaatacaattaattaaacttatttaaagattttataaataccatattggagttgaccgatagatacctactaacaagagcaatcaccaccaccccatgaggtggtttaggaatacaatcaataaacaacatccatgcccggcgacgtacatacctgtttgctatgatatctgttacgctacgcttgctaatttactgaaactcagcgtctgtcgacggagattcgtccgggccctgatacaacaagggcaagaaaaccacccgaaatacagatattcttataaaaatggatcatatttccatgtgcaagttcagctggcatcgtccagaatgcgtgtccaagaaatgaagcaagcacggtatacaggcacagaataatgctcactggccgggtgaaaaaaccaaaaacaatcattaatgctccaacgatttcgacaaggaccactattgctgcagtaatcgccggaaatataagcccaagagaggccattttatcgatagtgccagtgaatgatagcagcttgggaacgccggatatcatataaaggcatgccagcatcagacgggcaaggagcaacaatgccgacgtgtaatttcccatattaaaatacctgattttatccactatcaatgctcagtctccttgtttctgataaagccctgagccaaatccttaagtgtacgagcaccactcagtaacattgccgtcctcagttccgtcttcaggtgctcaatgacaccggcaacgcccccgacaccacctgctgcgatgccataaagaacaggacgtccgaccgcaacagccgttgccccaagagagatagcccttacaacatcaatccccctgcgaataccgctgtcaaaaatgaccggaactttgtgcccgactcttgcagcaacttcctgcaactggctgatggcagaaggaacaccatcaatctggcgaccaccatgattagacacctggatggcatctgctcctgcatcaatggcaaccactgcatcctcacccctgaggatgcccttgacaatgactggcagcccggtgattttttttacaaactcaatatcagccggggtcagctcaactttttggttaaaaaaatcacctttgccaccgtaacgggggtcatgattaccgaacgtcgctcctgcagggaaaggcgagctcatgctgagaaaagcatcacttgtcccgggaccaagcgcatccgctgtgataataatggctgaatagcctgccgcttttgcacgctccagtaaacttcgggtcacaccagcatccgcgttaaaatacagctggaaccatttaggtcctttactggcttttgcaatatcctccagagagcggttggatgcccctgatgattcataaagtgccccggccttttctgcacccgctgcagcaatcacctccccttccggatggacgaacatatgcgcgcccataggtgctatcagcaggggatgttccagatgatggcccaaaaggtcagtccggatatcaatgctgtgggcagcaactccactgagtcggtgaggtaacaaaggataatcactgaatgccctgcggttctcatgatacgtccactcatctccagcaccatgagcaatatatgcatacgcagcttccgtcatcacatcttttgctgaagtctccagtctgtccagactgatgatatgaagagatttgctggtcgatgtatcagcatgtccagacgttttactgatgatatgtgccgttgaagatgagatatttttggcaagggccggtgcagctgacagccctgcggcagatattcctaaaacggcattctgaataaaattacgtcgggaaagaggcataataagctccatatattataaataagccaggtctccctggcttataataatcatgccacgccctgaagcgggttggtgttgaaggtataaaggaaaattttccattcaccattaattttactgaggacaaaaacttcacggttcaggtcaataatggttttctgctctttaaagttcgttacaccagaacccacatggtggtgagtgcggacaaccgcggtatctccgttgatccagatagagtcaaacgcaaaatcggtctcaaccttttcacgcttgaacagatcatcgtactgcccctggcgtttttctgtattgtcacccgtcaacttatcattcccctgggaataactttcatcagcaaacaggcccaggatggtttttgtatccccggcattcagtgcgttctgatacttgattatcgtgtcatacacgttcttctgctcagtagcaatctaactgtctgtggagtatttgaatgtaccgccggattgttcaggtgagctttccttctgtgctgccgacgatgaggcagccagagcattagagccgaaaagaagggatgatgccatgactgctgttgctataaaatgtttcatatattctccatcagttcttctgggaatctgtgggcagcatatagcgctcatactatgctgctgtttcaatattagcggcagacgtcagccttgccgcactacttattggataagaatatcaaaagtgaccgcgaagtcaattttatcccaccacagaaggccactatttatgccagcaaatatgaatcgtcctcatcatgcacgaaagactcgtagttgcagcccggaaaaaactgccaggacacgacagcagatagcccgggcagcacttgaggagttctctgcacaagggttcgctcgcgccagcatcagcaatatcagcaagcgcgcaggagtagctaaaggcacggtatataactacttcccgacaaaggaattattgtttgaagcggttctgaaagagttcattgctaccgtccgtactgaactggaatcttccccccgccgccacggggaaaccgtaaaagcctatctgttgagagtgatgttacctgccatcagga

SEQ ID NO: 1542 - DNA, 1077 bp, Escherichia coli
atgaaaagaatctttttcataccattgtttttaattttactccctaagctggcggtagcgggtccggatgattatgtgccttcgcagatagcggttaatacatccacattgccaggtgttgtgattggtcctgctgatgcccatacctatccccgggtgataggagagctggcgggaacaagtaaccagtatgtttttaatggcggtgccatcgctctgatgcgtggaaagtttacacccgcactgcctaaaattggaagtattacgtatactttccatcaaggaaacagccgtgattcatctgattttgatatctatgatattggtgtatccggactgggtattattattggcatggcgggctattggcccgcaacgcctctggtccccataaatagctcaggtatatatattgaccctgtaggtgccaatacaaaccccaatacttataacggtgcgacagcaagcttcggagctcgtttgtttgttgcttttgtcgcaacgggaagattacccaatggatatataacaatacccaccaggcagcttggtactattttgttggaagcaaaacgtacaagtttaaataataaaggactgacagcacctgttatgttaaatggtgggcgcattcaggtacagagtcagacatgtaccatggggcaaaaaaactatgtggtgccattaaataccgtatatcaatcacagttcacatctttgtataaagaaatacagggaggtaaaattgacatacacctacaatgcccggatggaattgatgtttatgctacattgacagatgcatcacagccagtgaacagaacagatatattgaccttaagcagtgaatccactgcaaaaggatttggcatcaggctatataaagacagtgatgtaactgccatcagctatggtgaagactcccctgtgaaaggaaatggcagtcaatggcacttctccgattacaggggagaggtaaatccacatatcaatttaagagccaattatataaaaattgctgatgcaactacacctggaagtgtgaaggctattgcaactattactttctcatatcaa

SEQ ID NO: 1543 - protein, 359 aa, Escherichia coli
MKRIFFIPLFLILLPKLAVAGPDDYVPSQIAVNTSTLPGVVIGPADAHTYPRVIGELAGTSNQYVFNGGAIALMRGKFTPALPKIGSITYTFHQGNSRDSSDFDIYDIGVSGLGIIIGMAGYWPATPLVPINSSGIYIDPVGANTNPNTYNGATASFGARLFVAFVATGRLPNGYITIPTRQLGTILLEAKRTSLNNKGLTAPVMLNGGRIQVQSQTCTMGQKNYVVPLNTVYQSQFTSLYKEIQGGKIDIHLQCPDGIDVYATLTDASQPVNRTDILTLSSESTAKGFGIRLYKDSDVTAISYGEDSPVKGNGSQWHFSDYRGEVNPHINLRANYIKIADATTPGSVKAIATITFSYQ

SEQ ID NO: 1544 - DNA, 2532 bp, Escherichia coli
atgaacgctaataatctgtcatgcctgatttactgtcgttgttctcttctgctttttgctgcattagggttaacagtaacaaaccattcatttgctgctgaagaggctgagtttgattctgagtttttgcatttggataaagggataaatgctattgatatccgccgctttagtcatggtaaccctgtgcctgagggcaggtattattctgatatttatgttaataatgtatggaaggggaaggctgatttgcagtatttacgtactgccaataccggtgctccgacgttatgcctgacgcctgagctgctttcattgattgatttagtcaaagatactatgtcgggaaacacctcctgctttccggcgtcaacagggctttcttcagccagaattaattttgacttatcgactttaaggttgaatatcgaaatccctcaggcactgctgaatacacgtccaagaggatatatttcccctgctcagtggcaaagtggtgttcctgcagcatttataaactatgatgctaactattaccagtatagctcttccgggacgagtaacgaacagacttatctgggattaaaagctggattcaatttgtggggatgggctttgcgccaccgtggcagtgagagctggaataatagctatcctgccggatatcagaatatagaaacaagtataatgcatgaccttgccccattgagagcacaattcacattaggggatttttatacgaatggtgagctaatggatagcctcagtttgcggggagtcaggttagcatcggatgaacgaatgttacccggctctttacgtggctatgctcctgctgtccggggaatagctaacagtaatgctaaagtaaccatttatcaaaatgctcatatcctctatgaaacgacggtgccagccggaccatttgtcatcaatgatttatatcccagtggatatgctggtgaccttctcgttaagataacagagtctaatggccagacacgaatgttcacggttccttttgcggccgttgctcaactcattcgtcccggatttagtcgctggcaaatgtcagtgggaaagtatcgttatgcgaataaaacatataatgatttaatagcacaaggcacctatcaatacggcctgacgaatgatattactttaaacagtggtcttaccacagcttcaggatatacagcggggttagctggcctggcctttaatacccctctgggtgctatagcatctgacattacattgtccagaacagcattcaggtattccggtgtaacgcgtaaaggttatagtctgcactcaagttatagcatcaatattccagcctcaaacacaaatataactctggcggcttatcgttattcatcaaaagatttttatcatctgaaggatgcgctatcagctaatcacaacgcgtttattgatgatgtttctgtaaaaagtacagcgttttatcgtcccaggaatcaattccagatttcaatcaaccaggaattaggtgaaaaatggggtgggatgtatttaacaggaacaacctataattactggggacataaaggaagtcgtaatgaataccagattgggtacagcaacttctggaaacaactcggctatcaaattggattgtctcagtcaagagataatgagcaacaacgccgtgatgacagattttatataaattttactctccctctgggaggaagtgttcaaagcccggtgttttccactgttttaaattatagcaaagaagagaaaaatagtattcagacatcaattagtggtactggcggggaggataatcagttctcttatggtatttcaggaaacagccaggaaaacgggccttccggttatgcaatgaatgggggttatcgttcaccttatgtaaatataaccacaacagtcgggcatgatactcagaataataatcaaaggtcatttggtgcgtcgggagcggtggtcgcacacccctatggagtgacattgagtaatgacctgagtgatacttttgccattatccatgctgaaggagctcagggggctgtcatcaataatgcctctggtagtcgtctggatttttggggaaatggtgttgttccttatgttacaccctatgagaaaaatcaaattagcatcgatccctccaatttagatttgaatgttgaattatcggcgacggagcaggaaatcattcctcgtgctaatagcgccacgttagtgaaatttgacactaaaacaggaagaagtctgttatttgatattcgtatgtctactggcaatccccctccaatggcttctgaagttctggatgaacatggacagttggccggatatgtcgctcaggccgggaaggtatttaccaggggactccctgaaaaaggtcatctcagcgttgtatggggaccagataataaagacagatgttcatttgtatatcatgttgcacacaataaagatgatatgcaatctcagctcgttcctgttctgtgtatacagcaccctaatcaggaaaaaaca

SEQ ID NO: 1545 - protein, 844 aa, Escherichia coli
MNANNLSCLIYCRCSLLLFAALGLTVTNHSFAAEEAEFDSEFLHLDKGINAIDIRRFSHGNPVPEGRYYSDIYVNNVWKGKADLQYLRTANTGAPTLCLTPELLSLIDLVKDTMSGNTSCFPASTGLSSARINFDLSTLRLNIEIPQALLNTRPRGYISPAQWQSGVPAAFINYDANYYQYSSSGTSNEQTYLGLKAGFNLWGWALRHRGSESWNNSYPAGYQNIETSIMHDLAPLRAQFTLGDFYTNGELMDSLSLRGVRLASDERMLPGSLRGYAPAVRGIANSNAKVTIYQNAHILYETTVPAGPFVINDLYPSGYAGDLLVKITESNGQTRMFTVPFAAVAQLIRPGFSRWQMSVGKYRYANKTYNDLIAQGTYQYGLTNDITLNSGLTTASGYTAGLAGLAFNTPLGAIASDITLSRTAFRYSGVTRKGYSLHSSYSINIPASNTNITLAAYRYSSKDFYHLKDALSANHNAFIDDVSVKSTAFYRPRNQFQISINQELGEKWGGMYLTGTTYNYWGHKGSRNEYQIGYSNFWKQLGYQIGLSQSRDNEQQRRDDRFYINFTLPLGGSVQSPVFSTVLNYSKEEKNSIQTSISGTGGEDNQFSYGISGNSQENGPSGYAMNGGYRSPYVNITTTVGHDTQNNNQRSFGASGAVVAHPYGVTLSNDLSDTFAIIHAEGAQGAVINNASGSRLDFWGNGVVPYVTPYEKNQISIDPSNLDLNVELSATEQEIIPRANSATLVKFDTKTGRSLLFDIRMSTGNPPPMASEVLDEHGQLAGYVAQAGKVFTRGLPEKGHLSVVWGPDNKDRCSFVYHVAHNKDDMQSQLVPVLCIQHPNQEKT

SEQ ID NO: 1546 - DNA, 723 bp, Escherichia coli
atgctaaggtttgtgctgtttttttttactctatctgtatctgcagttgttcagggtagtgtagttatcatgggaacccgtgttgtttatccggcgactcaaaagagtattagcatacgtttaaataatgacaatgaatctccggcattagtccagtcctggttagacgatggagatgcagcagctccccctgagtcagtccacgttccttttatcattactccgccaatatttcgtatggactctaaatcaggacaaacagtcagaattgtatatacaggcgagtcactaccgaaagaccgagaatctcttttctatctaaatgttctggatattccagcaaagcccagggcaaaaaaagactccgataactcagagcagcggaataataattatttgcaactagctattcgtagtcgcataaaatttttctttcgtcctgctcacctgaagttaacaccaaatgatgcttatctgaaagtgacctggcaccaggaggaaggccgaattaaagcagttaatccaacaccttattacataacctacaacaaaattgcagttgaccagaataagcacttaacgcctgttgaacatggtggaatgattccccctttctcttcaacagtatttgcacttaaaggcagaactgcgccagccagcaaagtttcctgggttattgttaatgattacggaggatatcagcaaggagaatctgttctggag

SEQ ID NO: 1547 - protein, 241 aa, Escherichia coli
MLRFVLFFFTLSVSAVVQGSVVIMGTRVVYPATQKSISIRLNNDNESPALVQSWLDDGDAAAPPESVHVPFIITPPIFRMDSKSGQTVRIVYTGESLPKDRESLFYLNVLDIPAKPRAKKDSDNSEQRNNNYLQLAIRSRIKFFFRPAHLKLTPNDAYLKVTWHQEEGRIKAVNPTPYYITYNKIAVDQNKHLTPVEHGGMIPPFSSTVFALKGRTAPASKVSWVIVNDYGGYQQGESVLE

SEQ ID NO: 1548 - DNA, 546 bp, Escherichia coli
atgaaaataaaagttatagcattggctacatttgtttctgctgtgtttgctggttcagctatggcctatgacggaacaattacgtttaccggtaaagttgtagctcagacctgcacagttaatacaagcgacaaagacttagcagtaactttacccactgttgccacttcatctctaaaagacaatgctgctacgtcagggctgacaccctttgccattcgtttaactggttgtgcaactggtatgaatagtgctcagaatgttaaagcgtactttgagccttcaagtaacattgacttagctacacataatttaaaaaatactgctactccaactaaagcggataatgtacagattcagttgctaaatagtaatggaacttcaactattcttttgggggaagcggataatgggcaagatgtccagtctgagacaatcggatctgatggaagtgccacattgcgttatatggcccagtattatgcaacaggacaatctaccgcaggggatgtaaaagcgacggtccattataccattgcctacgaa

SEQ ID NO: 1549 - protein, 182 aa, Escherichia coli
MKIKVIALATFVSAVFAGSAMAYDGTITFTGKVVAQTCTVNTSDKDLAVTLPTVATSSLKDNAATSGLTPFAIRLTGCATGMNSAQNVKAYFEPSSNIDLATHNLKNTATPTKADNVQIQLLNSNGTSTILLGEADNGQDVQSETIGSDGSATLRYMAQYYATGQSTAGDVKATVHYTIAYE

SEQ ID NO: 1550 - DNA, 396 bp, Escherichia coli
atgggaaattacacgtcggcattgttgctccttgcccgtctgatgctggcatgcctttatatgatatccggcgttcccaagctgctatcattcactggcactatcgataaaatggcctctcttgggcttatatttccggcgattactgcagcaatagtggtccttgtcgaaatcgttggagcattaatgattgtttttggttttttcacccggccagtgagcattattctgtgcctgtataccgtgcttgcttcatttcttggacacgcattctggacgatgccagctgaacttgcacatggaaatatgatccatttttataagaatatctgtatttcgggtggttttcttgcccttgttgtatcagggcccggacgaatctccgtcgacagacgc

SEQ ID NO: 1551 - protein, 132 aa, Escherichia coli
MGNYTSALLLLARLMLACLYMISGVPKLLSFTGTIDKMASLGLIFPAITAAIVVLVEIVGALMIVFGFFTRPVSIILCLYTVLASFLGHAFWTMPAELAHGNMIHFYKNICISGGFLALVVSGPGRISVDRR

SEQ ID NO: 1552 - DNA, 1215 bp, Escherichia coli
atgcctctttcccgacgtaattttattcagaatgccgttttaggaatatctgccgcagggctgtcagctgcaccggcccttgccaaaaatatctcatcttcaacggcacatatcatcagtaaaacgtctggacatgctgatacatcgaccagcaaatctcttcatatcatcagtctggacagactggagacttcagcaaaagatgtgatgacggaagctgcgtatgcatatattgctcatggtgctggagatgagtggacgtatcatgagaaccgcagggcattcagtgattatcctttgttacctcaccgactcagtggagttgctgcccacagcattgatatccggactgaccttttgggccatcatctggaacatcccctgctgatagcacctatgggcgcgcatatgttcgtccatccggaaggggaggtgattgctgcagcgggtgcagaaaaggccggggcactttatgaatcatcaggggcatccaaccgctctctggaggatattgcaaaagccagtaaaggacctaaatggttccagctgtattttaacgcggatgctggtgtgacccgaagtttactggagcgtgcaaaagcggcaggctattcagccattattatcacagcggatgcgcttggtcccgggacaagtgatgcttttctcagcatgagctcgcctttccctgcaggagcgacgttcggtaatcatgacccccgttacggtggcaaaggtgatttttttaaccaaaaagttgagctgaccccggctgatattgagtttgtaaaaaaaatcaccgggctgccagtcattgtcaagggcatcctcaggggtgaggatgcagtggttgccattgatgcaggagcagatgccatccaggtgtctaatcatggtggtcgccagattgatggtgttccttctgccatcagccagttgcaggaagttgctgcaagagtcgggcacaaagttccggtcatttttgacagcggtattcgcagggggattgatgttgtaagggctatctctcttggggcaacggctgttgcggtcggacgtcctgttctttatggcatcgcagcaggtggtgtcgggggcgttgccggtgtcattgagcacctgaagacggaactgaggacggcaatgttactgagtggtgctcgtacacttaaggatttggctcagggctttatcagaaacaaggagactgagcat

SEQ ID NO: 1553 - protein, 405 aa, Escherichia coli
MPLSRRNFIQNAVLGISAAGLSAAPALAKNISSSTAHIISKTSGHADTSTSKSLHIISLDRLETSAKDVMTEAAYAYIAHGAGDEWTYHENRRAFSDYPLLPHRLSGVAAHSIDIRTDLLGHHLEHPLLIAPMGAHMFVHPEGEVIAAAGAEKAGALYESSGASNRSLEDIAKASKGPKWFQLYFNADAGVTRSLLERAKAAGYSAIIITADALGPGTSDAFLSMSSPFPAGATFGNHDPRYGGKGDFFNQKVELTPADIEFVKKITGLPVIVKGILRGEDAVVAIDAGADAIQVSNHGGRQIDGVPSAISQLQEVAARVGHKVPVIFDSGIRRGIDVVRAISLGATAVAVGRPVLYGIAAGGVGGVAGVIEHLKTELRTAMLLSGARTLKDLAQGFIRNKETEH

SEQ ID NO: 1554 - DNA, 306 bp, Escherichia coli
atggtggtgagtgcggacaaccgcggtatctccgttgatccagatagagtcaaacgcaaaatcggtctcaaccttttcacgcttgaacagatcatcgtactgcccctggcgtttttctgtattgtcacccgtcaacttatcattcccctgggaataactttcatcagcaaacaggcccaggatggtttttgtatccccggcattcagtgcgttctgatacttgattatcgtgtcatacacgttcttctgctcagtagcaatctaactgtctgtggagtatttgaatgtaccgccggattgttcagg

SEQ ID NO: 1555 - protein, 102 aa, Escherichia coli
MVVSADNRGISVDPDRVKRKIGLNLFTLEQIIVLPLAFFCIVTRQLIIPLGITFISKQAQDGFCIPGIQCVLILDYRVIHVLLLSSNLTVCGVFECTAGLFR

SEQ ID NO: 1556 - DNA, 333 bp, Escherichia coli
atgccagcaaatatgaatcgtcctcatcatgcacgaaagactcgtagttgcagcccggaaaaaactgccaggacacgacagcagatagcccgggcagcacttgaggagttctctgcacaagggttcgctcgcgccagcatcagcaatatcagcaagcgcgcaggagtagctaaaggcacggtatataactacttcccgacaaaggaattattgtttgaagcggttctgaaagagttcattgctaccgtccgtactgaactggaatcttccccccgccgccacggggaaaccgtaaaagcctatctgttgagagtgatgttacctgccatcagg

SEQ ID NO: 1557 - protein, 111 aa, Escherichia coli
MPANMNRPHHARKTRSCSPEKTARTRQQIARAALEEFSAQGFARASISNISKRAGVAKGTVYNYFPTKELLFEAVLKEFIATVRTELESSPRRHGETVKAYLLRVMLPAIR

SEQ ID NO: 1558 - DNA, 366 bp, Escherichia coli
atgccagaccagttcgcatcgctgggaactgcagcatgcgttatcgacaaagccggaaacggcatggctctcagcagttggtcggcgtcagatgcaactggtgccgtgacggtgggagttgtggcgaagggcacacatcagaattcaatggcacagggggagttttcctgtacaacccgtgaaaatgaagtttacatcagatatgactcaggtgtcacaaaccctgtcagtccgcggggaccggataaaatccggggtcccggtggtatcagtgatggtgcatgggatacggaagcagccactatcaggcaactgaacccgctgacggatgaggtgtacagtggcatcagtggacggattacagca

SEQ ID NO: 1559 - protein, 122 aa, Escherichia coli
MPDQFASLGTAACVIDKAGNGMALSSWSASDATGAVTVGVVAKGTHQNSMAQGEFSCTTRENEVYIRYDSGVTNPVSPRGPDKIRGPGGISDGAWDTEAATIRQLNPLTDEVYSGISGRITA

SEQ ID NO: 1560 - DNA, 291 bp, Escherichia coli
atgctgcagttcccagcgatgcgaactggtctggcatgcattcacgaaccaacagcagtggtgctacgtccggatgcaattcgcatgagctccaaccgcggttgtaagttcagcagcccgggcctctgcccccggcacagtcgcataagtattcgataccgtgcgacaccattaccttcaggatacgccacggacccgtcaccctacgaaaacgccggaacaccggcaatcagcaaaggcagcagtgataaaagactgatatatttcctgtcattatttttcatattaatt

SEQ ID NO: 1561 - protein, 97 aa, Escherichia coli
MLQFPAMRTGLACIHEPTAVVLRPDAIRMSSNRGCKFSSPGLCPRHSRISIRYRATPLPSGYATDPSPYENAGTPAISKGSSDKRLIYFLSLFFILI

SEQ ID NO: 1562 - DNA, 2748 bp, Escherichia coli
tattcgtgcgtttccacacgacgaccggttcccgcactttcttcttcaaccttaaacggcacaccgcgaaatgacgcgtcctgaagtctgtctttccacgtcatataaactccgtacataaaaaatcccaccggagtgggactcattaacagattaatttttcattacctgccaaagcgcgtatagccaacatcatggctgacatcaaaaccgctggatcgcgtttccataacccgcatacccggaggtgaattcacaaaagagaccttgatctcaccatcaacttttggcgcagaagctttgttaatcatgaagggattcgggcctgtggcaccggaggcgttgtttgactgagccggatccaccgcctgataaggtgtgtatccccgtgccggtattcccgtcccataagcatcataagcacccgcgccccactgcgcagagttaatggcatcgaccgtgtcaccggaactgtcggtaaaccactcaataattggcttcagcttgtcccacatatcctgaaaccacttaacaaccggtccccagttattgattaccatccccagcggcgaccaggcaaaaaccttcttcagaagttcccggccagcctcaaaataaggaccaatggtttcccagagcttcttgaaataaggtccgacaacatcccagttagtgataattaatcccgcagccagggctatcgccgtcgcaatcatgccaatcggcgtcatcgacatgatcctgctgacaatactgatggcaccgccaacgcccatcaatcccagtttcagaatcgcaagaccggcagcaagcccgacgacgccgcgaataacccggggattttcatccgcaaacttcgtgaatttctcccccaactcccccagccattgcgtgatatttttagcgtcaccagaaaatgcgccgccaatagccgcaaggccgttagttgcggtccctgtcattgcctcccacaggttggacagcgtaccaagctgtgcctgaacacgtttattcagactggcctgtttattcatcttctgctggatctggtcgtagccatcctttcctttatcgattagtgcattgaccacctgaagggtttcggcatcatcaccaaatattgccttaagtacaccagttcgcttaacgtcggtcagttttcgcagctttgccagttgcctgaacatgttatcaagaccgccaaaactccctttgccgtcagtaaaatcgagctgtaccccgagtttctggcgggccatgactttattgacgtccctgattttcttaacgcttaatccggactggataacttttcgcagggcgttacctgccgactccccgttcatccccatctgatccatcatgacgctgatgggggcaaggctctgtgcagcctgaagaccgtccttgttcaccatcttcagaacagagctggttttagtgaagaaggacaacatgttggtatcgtcaacgcccagataaaacgccttctggatagtgtcgaacagccccatcatgtcttctgacgccgttccggtagcatcctgcatctttgcggcaaactcggcagccgcttccggtgtttttttcagttgtaccgcaagataagctgtcgctttacccacaccgccaagaatgttttctgccgggatcccctgacgcaccagcatctgcatcatgttctggaaatcagccgttgtaccgggtagctggttacccagaccaatagccagtttattgatgtcctgaaagcgctttccgacctcaccgttcgcatccatcatggcaactttcagcccggtggcggcgttttcctgatcggcataagatttcagggaaagcgtcagacccgcagccagtccgccaccaagcgccagcccaccctgtgacgcttcttccgcctggcgtttaaatccccggattttcttttgcattttcgacagcgcgggagaaagcctgtcgacaccggtgatcaacgccttaagctcaaattcagccatgtgtgcgtttctcctgctctatcctgtttgcctgactgaccagcaagggaatttcactgatcggcatattcagcaattcgaagggattaatgcgccagtagctggcgcagtcaaagaagcgatcagtgaggtattcagccgtcaggcctggaggaaaaaaccagccacaagccacgccgcagcattcaggtctgccggagacatctggtcgacagagttttgcggcactttcgccagccgcacaatgtatttcgataccacatgcgccagaagtctgacggactcatcctgattcatctggtagggataccccagctcgcggacatctttcccggtgggctcatcaaactccagtacggagagtgtctcgccatgagcggtaatcggtttctttaactcaagctctttcattactggtaatccccttcttcaccgtggaactcaagatcaaccgtcccttcttcggcattatggttcgcttcgccgtgcagccaggcagacgacagtacatagacctgaccgttcgccagctcggcagtgatggtcatctcatcagacgaggtgattttgctcaccggaaaattcttcggcaccttgaaggtccctttaacataaggcgcacggtgagtttccttggggtccactgaaccgtccagacgttatgatgtcatcatttaccgtcctgttcatgggcacctcaatgcggccggtcaacgacagctgttctctgtcaattttaaaaacacag

SEQ ID NO: 1563 - DNA, 1833 bp, Escherichia coli
atggctgaatttgagcttaaggcgttgatcaccggtgtcgacaggctttctcccgcgctgtcgaaaatgcaaaagaaaatccggggatttaaacgccaggcggaagaagcgtcacagggtgggctggcgcttggtggcggactggctgcgggtctgacgctttccctgaaatcttatgccgatcaggaaaacgccgccaccgggctgaaagttgccatgatggatgcgaacggtgaggtcggaaagcgctttcaggacatcaataaactggctattggtctgggtaaccagctacccggtacaacggctgatttccagaacatgatgcagatgctggtgcgtcaggggatcccggcagaaaacattcttggcggtgtgggtaaagcgacagcttatcttgcggtacaactgaaaaaaacaccggaagcggctgccgagtttgccgcaaagatgcaggatgctaccggaacggcgtcagaagacatgatggggctgttcgacactatccagaaggcgttttatctgggcgttgacgataccaacatgttgtccttcttcactaaaaccagctctgttctgaagatggtgaacaaggacggtcttcaggctgcacagagccttgcccccatcagcgtcatgatggatcagatggggatgaacggggagtcggcaggtaacgccctgcgaaaagttatccagtccggattaagcgttaagaaaatcagggacgtcaataaagtcatggcccgccagaaactcggggtacagctcgattttactgacggcaaagggagttttggcggtcttgataacatgttcaggcaactggcaaagctgcgaaaactgaccgacgttaagcgaactggtgtacttaaggcaatatttggtgatgatgccgaaacccttcaggtggtcaatgcactaatcgataaaggaaaggatggctacgaccagatccagcagaagatgaataaacaggccagtctgaataaacgtgttcaggcacagcttggtacgctgtccaacctgtgggaggcaatgacagggaccgcaactaacggccttgcggctattggcggcgcattttctggtgacgctaaaaatatcacgcaatggctgggggagttgggggagaaattcacgaagtttgcggatgaaaatccccgggttattcgcggcgtcgtcgggcttgctgccggtcttgcgattctgaaactgggattgatgggcgttggcggtgccatcagtattgtcagcaggatcatgtcgatgacgccgattggcatgattgcgacggcgatagccctggctgcgggattaattatcactaactgggatgttgtcggaccttatttcaagaagctctgggaaaccattggtccttattttgaggctggccgggaacttctgaagaaggtttttgcctggtcgccgctggggatggtaatcaataactggggaccggttgttaagtggtttcaggatatgtgggacaagctgaagccaattattgagtggtttaccgacagttccggtgacacggtcgatgccattaactctgcgcagtggggcgcgggtgcttatgatgcttatgggacgggaataccggcacggggatacacaccttatcaggcggtggatccggctcagtcaaacaacgcctccggtgccacaggcccgaatcccttcatgattaacaaagcttctgcgccaaaagttgatggtgagatcaaggtctcttttgtgaattcacctccgggtatgcgggttatggaaacgcgatccagcggttttgatgtcagccatgatgttggctatacgcgctttggcagg

SEQ ID NO: 1564 - protein, 611 aa, Escherichia coli
MAEFELKALITGVDRLSPALSKMQKKIRGFKRQAEEASQGGLALGGGLAAGLTLSLKSYADQENAATGLKVAMMDANGEVGKRFQDINKLAIGLGNQLPGTTADFQNMMQMLVRQGIPAENILGGVGKATAYLAVQLKKTPEAAAEFAAKMQDATGTASEDMMGLFDTIQKAFYLGVDDTNMLSFFTKTSSVLKMVNKDGLQAAQSLAPISVMMDQMGMNGESAGNALRKVIQSGLSVKKIRDVNKVMARQKLGVQLDFTDGKGSFGGLDNMFRQLAKLRKLTDVKRTGVLKAIFGDDAETLQVVNALIDKGKDGYDQIQQKMNKQASLNKRVQAQLGTLSNLWEAMTGTATNGLAAIGGAFSGDAKNITQWLGELGEKFTKFADENPRVIRGVVGLAAGLAILKLGLMGVGGAISIVSRIMSMTPIGMIATAIALAAGLIITNWDVVGPYFKKLWETIGPYFEAGRELLKKVFAWSPLGMVINNWGPVVKWFQDMWDKLKPIIEWFTDSSGDTVDAINSAQWGAGAYDAYGTGIPARGYTPYQAVDPAQSNNASGATGPNPFMINKASAPKVDGEIKVSFVNSPPGMRVMETRSSGFDVSHDVGYTRFGR

SEQ ID NO: 1565 - DNA, 291 bp, Escherichia coli
atgtgtgcgtttctcctgctctatcctgtttgcctgactgaccagcaagggaatttcactgatcggcatattcagcaattcgaagggattaatgcgccagtagctggcgcagtcaaagaagcgatcagtgaggtattcagccgtcaggcctggaggaaaaaaccagccacaagccacgccgcagcattcaggtctgccggagacatctggtcgacagagttttgcggcactttcgccagccgcacaatgtatttcgataccacatgcgccagaagtctgacggactcatcc

SEQ ID NO: 1566 - protein, 97 aa, Escherichia coli
MCAFLLLYPVCLTDQQGNFTDRHIQQFEGINAPVAGAVKEAISEVFSRQAWRKKPATSHAAAFRSAGDIWSTEFCGTFASRTMYFDTTCARSLTDSS

SEQ ID NO: 1567 - DNA, 300 bp, Escherichia coli
ttgaccggccgcattgaggtgcccatgaacaggacggtaaatgatgacatcataacgtctggacggttcagtggaccccaaggaaactcaccgtgcgccttatgtaaagggaccttcaaggtgccgaagaattttccggtgagcaaaatcacctcgtctgatgagatgaccatcactgccgagctggcgaacggtcaggtctatgtactgtcgtctgcctggctgcacggcgaagcgaaccataatgccgaagaagggacggttgatcttgagttccacggtgaagaaggggattaccag

SEQ ID NO: 1568 - protein, 100 aa, Escherichia coli
LTGRIEVPMNRTVNDDIITSGRFSGPQGNSPCALCKGTFKVPKNFPVSKITSSDEMTITAELANGQVYVLSSAWLHGEANHNAEEGTVDLEFHGEEGDYQ

SEQ ID NO: 1569 - DNA, 240 bp, Escherichia coli
atgctgttttgtgctttctttttactggatttcttcgtagatcatattgtaatacgtgttttttctcttcaagagtttttaataagttatccgcttcactttctggcagttcgtctaagagatctaaaaaaatacgttgtcgtggcgttagaacccttgtttcataactggaggctgtgttcgttgatgatgaaacgataccatccatccatccccggggtaacccaaaggactcttcga

SEQ ID NO: 1570 - protein, 80 aa, Escherichia coli
MLFCAFFLLDFFVDHIVIRVFSLQEFLISYPLHFLAVRLRDLKKYVVVALEPLFHNWRLCSLMMKRYHPSIPGVTQRTLR

SEQ ID NO: 1571 - DNA, 675 bp, Escherichia coli; identical to SEQ ID NO: 154

SEQ ID NO: 1572 - DNA, 408 bp, Escherichia coli
atgaaaacttttatcaaaactttactcgttgctgtaactattctgttctctgtcttcgctacggcgaaacaagtaaaactgccaaacaacatcaaatacgttaatactacagaggcgttttcctgtactgagattgacggtatgaattgccagacgaagaatccgtttaactataaagataacagctatgttttcgtgcttgaacgtggtggtgcctggtgttacgactacactgtctcggtacttaacctgaaaaccgggaaagcacagatgctcgaatacaaagacaaccagctgtgctcaggtagcaacaaaccgttcttcgaaatcaaaaatggcgtaccgacggtaggagtcatcgacacatccggaaaacctgtcgttgtggctctggacaaacttaaaacc

SEQ ID NO: 1573 - protein, 225 aa, Escherichia coli
MQLPVKLLMSLISLVSVIARAGKYKNYIRDEIKYWRYTSYKGGEFPEGFTDEKFSSAIYNGRIFTMKRLHTLMLFLAVLFTGFNVEAASVKQALSCDPNARAEQPGACPTTYELYEGDAAYKAALDKALKPVGLSGMFGKGGYMDGPGGNVTPVTINGTVWLQGDGCKANTCGWDFIVTLYNPKTHEVVGYRYFGLDDPAYLVWFGEIGVHEFAYLVKNYVAAVN

SEQ ID NO: 1574 - protein, 136 aa, Escherichia coli
MKTFIKTLLVAVTILFSVFATAKQVKLPNNIKYVNTTEAFSCTEIDGMNCQTKNPFNYKDNSYVFVLERGGAWCYDYTVSVLNLKTGKAQMLEYKDNQLCSGSNKPFFEIKNGVPTVGVIDTSGKPVVVALDKLKT

SEQ ID NO: 1575 - DNA, 1446 bp, Escherichia coli
atgcgaattagatcactggatgatgcagcgactacagaagagacattgctcactcttgcgttgactcccttagtgaaagagttgaaggctctggagtgtaataaagagtcacaaatatcaaaagttaaagcagctttggttaaagctgtaaatgagatcgctgaacctcatcaagaacgattttcttctatttctcgacaaattcagacagggtttcaacatgtctttcctgctcttggtgttcagctcagtgttgaaatgaatccacctgagcttaaaatagacaatttattaaagcaggggtctggtttattagtcaaagaggctgcgggaaactctcgcattgggcaacaggggacaggagcaagacgagctcttttttgggcaatgctccaggttcataatgaaattagccgacaaaatgaaaagcgagaagctcttcttaaatcctttagagaacaacttaaaaaagaggtgaggaaaaatgtaaaaagtgaaaatataaatctgctgaaacaacaaatagatgctattgaaaatggcgcccctgttcctgaagatacagacgatccagccttgcccggatatattcttttaatggatgagccagaaaatgcgttacacccaatggctgccagagcggcgcaagcgcatctttatgaacttggtaaacatccagattggcaggtgctattaacaactcattcaccatactttataaaccctcttgaggatcatactacgattgctcgtatgcaacgttcaacagatgggaaatcactttctccacgcttgtatgtggctgatgaagctaacttctcacctgatgagaaagataatttacaggcactacaacttacagatattggttttgctgaaatattttttgggagttatccaattattgttgaaggtgatactgaacatgcggcatttatttcagcaatcactaaagaaaaacatgagatgtcaggtaaggtaagtattgtcagagccagaggtaaggcggttctggtccctttgataaagatgttaaatcattttaaagcagattttgggattgtacatgatattgattggccttatcgtagatatggtccgaataatggttcatggacgcttaatacgatcattagaaatgagattataaaatgcaggaataatgggaaaaaagtatatcatcgttggagtgcccccgattttgagcgttttttaggtggtgaggagttggggaaagataaaccctatacagcatttaatcgaatttcgcgcgatgaaaaattaaaagaaaagattcaaaatcttataattaatttgtttgaaggggagtgttatgatcctgatgactttgaacccgatgatgattttaatgctcaactcatggaacaattaaaaatatgggcaaaaaataatggtgaaagtgataatgttcgcgttatgggatgc

SEQ ID NO: 1576 - protein, 482 aa, Escherichia coli
MRIRSLDDAATTEETLLTLALTPLVKELKALECNKESQISKVKAALVKAVNEIAEPHQERFSSISRQIQTGFQHVFPALGVQLSVEMNPPELKIDNLLKQGSGLLVKEAAGNSRIGQQGTGARRALFWAMLQVHNEISRQNEKREALLKSFREQLKKEVRKNVKSENINLLKQQIDAIENGAPVPEDTDDPALPGYILLMDEPENALHPMAARAAQAHLYELGKHPDWQVLLTTHSPYFINPLEDHTTIARMQRSTDGKSLSPRLYVADEANFSPDEKDNLQALQLTDIGFAEIFFGSYPIIVEGDTEHAAFISAITKEKHEMSGKVSIVRARGKAVLVPLIKMLNHFKADFGIVHDIDWPYRRYGSNNGSWTLNTIIRNEIIKCRNNGKKVYHRWSAPDFERFLGGEELGKDKPYTAFNRISRDEKLKEKIQNLIINLFEGECYDPDDFEPDDDFNAQLMEQLKIWAKNNGESDNVRVMGC
